(19) United States
(12) Patent Application Publication
(10) Pub. No.: US 2024/0376496 A1
(43) Pub. Date: Nov. 14, 2024

(54) AAV CAPSID COMPOSITIONS AND METHODS FOR DELIVERY

(71) Applicant: BIOMARIN PHARMACEUTICAL INC., Novato, CA (US)

(72) Inventors: Peter COLOSI, San Anselmo, CA (US); Vincent LEONARD, Alameda, CA (US); Silvia RAMIREZ, Windsor, CA (US); Justin ISHIDA, San Rafael, CA (US); Yu-Shan TSENG, San Rafael, CA (US); Teague STERLING, San Anselmo, CA (US)

(73) Assignee: BIOMARIN PHARMACEUTICAL INC., Novato, CA (US)

(21) Appl. No.: 18/688,685

(22) PCT Filed: Sep. 2, 2022
(86) PCT No.: PCT/US2022/075950

§ 371 Date: Mar. 1, 2024

Related U.S. Application Data
(60) Provisional application No. 63/240,774, filed on Sep. 3, 2021.

(51) Int. Cl. C12N 15/86; A61K 48/00; C07K 14/005

(52) U.S. Cl. CPC C12N 15/86; A61K 48/0058; C07K 14/005; C12N 2750/14122; C12N 2750/14143

(57) ABSTRACT

The disclosure provides various compositions comprising novel adeno-associated virus (AAV) capsid sequences and functional fragments thereof. Also provided, are methods of delivery, treatment and manufacture using the compositions provided by the disclosure.

### 1. CROSS-REFERENCE TO RELATED APPLICATIONS AND INCORPORATION BY REFERENCE

[0001] This application claims the benefit of U.S. Provisional Patent Application No. 63/240,774, filed Sep. 3, 2021, which is incorporated herein in its entirety.

[0002] All of the patents, patent applications and publications referred to herein are incorporated by reference herein in their entireties. Citation or identification of any reference in this application is not an admission that such reference is available as prior art to this application.

### 2. SEQUENCE LISTING

[0003] This application contains a computer readable Sequence Listing which has been submitted in XML file format with this application, the entire content of which is incorporated by reference herein in its entirety. The Sequence Listing XML file submitted with this application is entitled “11808-473-228_SEQ_LISTING.xml”, was created on Aug. 24, 2022 and is 913,813 bytes in size.

### 3. BACKGROUND

[0004] Gene therapy approaches using recombinant adeno-associated virus (AAV) based vectors for delivery have demonstrated safety and long-term efficacy in a number of clinical trials. Following these successes, a handful of AAV-based gene therapy products have been approved by the Food and Drug Administration and/or European Medicine Agency, such as, Glybera (which uses, AAV-1), Luxturna (which uses, AAV-2), and Zolgensma (which uses, AAV-9).

[0005] Despite these advances in AAV-based gene therapy, these studies also revealed several technical hurdles to using AAV-based vectors as a therapeutic modality more widely such as, the need for AAV vectors with increased evasion of AAV-neutralizing antibodies present in the blood, and the need for AAV vectors with enhanced tissue specificity, referred to as tropism.

[0006] Thus, there is still an ongoing unmet need for AAV-based vectors with improved functional characteristics that will allow for the broader application of AAV-based vectors as a therapeutic modality.

### 4. SUMMARY

[0007] The present disclosure provides various compositions comprising novel AAV capsid sequences that have enhanced ability to evade neutralizing antibodies, enhanced tissue specificity, and/or increased cell transduction, thereby permitting broader use of AAV-based vectors for delivery and/or treatment of disease. The embodiments described herein relate to novel AAV capsid sequences and/or their functional fragments, AAV clades, AAV branches (i.e., a group of AAV clades), recombinant AAV viral particles, vectors, rAAV vector genome constructs, host cells, and pharmaceutical compositions for delivering a biomolecule (e.g., a therapeutic biomolecule). In particular, the compositions of the disclosure can be used for in vitro, in vivo, and/or ex vivo delivery to the muscle, heart, brain, plasma, kidney, liver and/or cancer cell(s). In some embodiments, the compositions of the disclosure can be used for in vitro, in vivo, and/or ex vivo delivery to the muscle, heart, brain, plasma, kidney, liver, ear and/or cancer cell(s). The embodiments described herein also relate to methods of treatment comprising administering to a subject in need of treatment any of the novel AAV capsid sequences, rAAV vector genomes, recombinant AAV (rAAV) viral particles, host cells, or pharmaceutical compositions provided herein. The embodiments described herein also relate to methods of treatment comprising administering to a subject in need of treatment any of the novel AAV capsid sequences, rAAV vector genomes, recombinant AAV (rAAV) viral particles, host cells, or pharmaceutical compositions provided herein and a biomolecule (e.g., a therapeutic biomolecule). Methods of manufacturing a novel rAAV viral particle of the disclosure are also provided.

[0008] In one aspect, provided herein is a member of an adeno-associated virus (AAV) clade. In a specific embodiment, provided herein is a member of a clade in any one of Table 2. In a specific aspect, provided herein is a member of an AAV clade, comprising: (a) a VP1 amino acid sequence that has at least 90% identity to the VP1 amino acid sequence of any one of SEQ ID NOs: 12-127 and 361-362, (b) a VP2 amino acid sequence that has at least 90% identity to the VP2 amino acid sequence of any one of SEQ ID NOs: 12-127 and 361-362, or (c) a VP3 amino acid sequence that has at least 90% identity to the VP3 amino acid sequence of any one of SEQ ID NOs: 12-127 and 361-362. In some embodiments, the AAV clade member comprises: (a) a VP1 amino acid sequence that is at least 91%, at least 92%, at least 93%, at least 94%, at least 95%, at least 96%, at least 97%, at least 98%, or at least 99% identity to the VP1 amino acid sequence of any one of SEQ ID NOs: 12-127 and 361-362, (b) a VP2 amino acid sequence that is at least 91%, at least 92%, at least 93%, at least 94%, at least 95%, at least 96%, at least 97%, at least 98%, or at least 99% identity to the VP2 amino acid sequence of any one of SEQ ID NOs: 12-127 and 361-362, or (c) a VP3 amino acid sequence that is at least 91%, at least 92%, at least 93%, at least 94%, at least 95%, at least 96%, at least 97%, at least 98%, or at least 99% identity to the VP3 amino acid sequence of any one of SEQ ID NOs: 12-127 and 361-362. In one embodiment, the AAV clade member comprises: (a) a VP1 amino acid sequence that has at least 95% identity to the VP1 amino acid sequence of any one of SEQ ID NOs: 12-127 and 361-362, (b) a VP2 amino acid sequence that has at least 95% identity to the VP2 amino acid sequence of any one of SEQ ID NOs: 12-127 and 361-362, or (c) a VP3 amino acid sequence that has at least 95% identity to the VP3 amino acid sequence of any one of SEQ ID NOs: 12-127 and 361-362. In certain embodiments, the AAV clade member comprises a VP1 amino acid sequence that has at least 98% identity to the VP1 amino acid sequence of any one of SEQ ID NOs: 12-127 and 361-362. In certain embodiments, the VP1, VP2, or VP3 amino acid sequence comprises a variable region sequence, wherein the variable region sequence is selected from the variable region of at least one of SEQ ID NOs: 12-127 and 361-362. In a specific embodiment, the VP1 amino acid sequence further comprises a GBS region sequence, wherein the GBS region sequence is selected from the GBS region sequence of at least one of: SEQ ID NOs: 12-127 and 361-362. In another embodiment, the VP1 amino acid sequence further comprises a GH loop sequence, wherein the GH loop sequence is selected from the GH loop of at least one of: SEQ ID NOs: 12-127 and 361-362. In some embodiments, the AAV clade member comprises a VP2 amino acid sequence that is the VP2 amino acid sequence of any one of SEQ ID NOs: 12-127 and 361-362. In certain embodiments, the AAV clade member comprises a VP3 amino acid sequence that is the VP3 amino acid sequence of any one of SEQ ID NOs: 12-127 and 361-362. In some embodiments, the AAV clade member comprises a VP1 amino acid sequence that is the VP1 amino acid sequence of any one of SEQ ID NOs: 12-127 and 361-362. In specific embodiments, the VP1, VP2, or VP3 amino acid sequence of the AAV clade member comprises one or more of the amino acid modifications listed in Table 2. In specific embodiments, the one or more of the amino acid modifications of the VP1, VP2, or VP3 amino acid sequence of the AAV clade member are limited to the ones listed in Table 2. In specific embodiments, the AAV clade member further comprises the ability to evade AAV humoral immunity as determined in an in vitro assay. In a specific embodiment, the in vitro assay is an IVIg assay that determines a percent (%) transduction, and wherein the % transduction is about 2% to about 500% greater transduction as compared to a reference AAV at a given IVIg concentration. In another specific embodiment, the in vitro assay is an IVIg assay that determines a neutralizing antibody (Nab) titer, and wherein the NAb titer is reduced to about 1-fold to about 4,000-fold as compared to a reference AAV. In another specific embodiment, the in vitro assay is an IVIg assay that determines a NC₅₀, and wherein the NC₅₀ increases from about 1-fold to about 600-fold as compared to a reference AAV.

[0009] In some embodiments, provided herein is a member of an AAV clade, comprising: (a) a VP1 amino acid sequence that has at least 90% identity to a VP1 amino acid sequence set forth in Table 9 which is identified by a “BCD_” prefix, (b) a VP2 amino acid sequence that has at least 90% identity to the VP2 amino acid sequence of the amino acid sequence set forth in Table 9 which is identified by a “BCD_” prefix, or (c) a VP3 amino acid sequence that has at least 90% identity to the VP3 amino acid sequence of the amino acid sequence set forth in Table 9 which is identified by a “BCD_” prefix. In some embodiments, the AAV clade member comprises: (a) a VP1 amino acid sequence that is at least 91%, at least 92%, at least 93%, at least 94%, at least 95%, at least 96%, at least 97%, at least 98%, or at least 99% identity to a VP1 amino acid sequence set forth in Table 9 which is identified by a “BCD_” prefix, (b) a VP2 amino acid sequence that is at least 91%, at least 92%, at least 93%, at least 94%, at least 95%, at least 96%, at least 97%, at least 98%, or at least 99% identity to the VP2 amino acid sequence of the amino acid sequence set forth in Table 9 which is identified by a “BCD_” prefix, or (c) a VP3 amino acid sequence that is at least 91%, at least 92%, at least 93%, at least 94%, at least 95%, at least 96%, at least 97%, at least 98%, or at least 99% identity to the VP3 amino acid sequence of the amino acid sequence set forth in Table 9 which is identified by a “BCD_” prefix. In some embodiments, the AAV clade member comprises: (a) a VP1 amino acid sequence that has at least 95% identity to a VP1 amino acid sequence set forth in Table 9 which is identified by a “BCD_” prefix, (b) a VP2 amino acid sequence that has at least 95% identity to the VP2 amino acid sequence of the amino acid sequence set forth in Table 9 which is identified by a “BCD_” prefix, or (c) a VP3 amino acid sequence that has at least 95% identity to the VP3 amino acid sequence of the amino acid sequence set forth in Table 9 which is identified by a “BCD_” prefix. In certain embodiments, the AAV clade member comprises a VP1 amino acid sequence that has at least 98% identity to a VP1 amino acid sequence set forth in Table 9 which is identified by a “BCD_” prefix. In certain embodiments, the VP1, VP2, or VP3 amino acid sequence comprises a variable region sequence, wherein the variable region sequence is selected from the variable region of an amino acid sequence set forth in Table 9 which is identified by a “BCD_” prefix. In a specific embodiment, the VP1 amino acid sequence comprises a GBS region sequence, wherein the GBS region sequence is selected from the GBS region sequence of an amino acid sequence set forth in Table 9 which is identified by a “BCD_” prefix. In another embodiment, the VP1 amino acid sequence comprises a GH loop sequence, wherein the GH loop sequence is selected from the GH loop of an amino acid sequence set forth in Table 9 which is identified by a “BCD_” prefix. For example, in some embodiments, a member of specific clade in any one of Table 2 (e.g., Table 2.6, 2.7, 2.8, 2.9, 2.10, 2.11, 2.12, 2.13, 2.14, or 2.15) that comprises a VP1 amino acid sequence that is at least 90%, at least 95%, at least 98%, or at least 99% identical to a VP1 amino acid sequence of a capsid protein with a “BCD_” prefix in the same table, comprises a variable region sequence (e.g., GBS region or GH loop) that is identical to the GBS region or GH loop found in the VP1 amino acid sequence of the capsid protein with the “BCD_” prefix in the same table. In some embodiments, the AAV clade member comprises a VP2 amino acid sequence that is the VP2 amino acid sequence of an amino acid sequence set forth in Table 9 which is identified by a “BCD_” prefix. In certain embodiments, the AAV clade member comprises a VP3 amino acid sequence that is the VP3 amino acid sequence of an amino acid sequence set forth in Table 9 which is identified by a “BCD_” prefix. In some embodiments, the AAV clade member comprises a VP1 amino acid sequence of a VP1 amino acid sequence set forth in Table 9 which is identified by a “BCD_” prefix. In specific embodiments, the VP1, VP2, or VP3 amino acid sequence of the AAV clade member comprises one or more of the amino acid modifications listed in Table 2. In specific embodiments, the one or more of the amino acid modifications of the VP1, VP2, or VP3 amino acid sequence of the AAV clade member are limited to the ones listed in Table 2. For example, in some embodiments, a member of specific clade in any one of Table 2 (e.g., Table 2.6, 2.7, 2.8, 2.9, 2.10, 2.11, 2.12, 2.13, 2.14, or 2.15) that comprises a VP1 amino acid sequence that is at least 90%, at least 95%, at least 98%, or at least 99% identical to a VP1 amino acid sequence of a capsid protein with a “BCD_” prefix in the same table, comprises one or more of the amino acid modifications identified in that table. In specific embodiments, the AAV clade member further comprises the ability to evade AAV humoral immunity as determined in an in vitro assay. In a specific embodiment, the in vitro assay is an IVIg assay that determines a percent (%) transduction, and wherein the % transduction is about 2% to about 500% greater transduction as compared to a reference AAV at a given IVIg concentration. In another specific embodiment, the in vitro assay is an IVIg assay that determines a neutralizing antibody (Nab) titer, and wherein the NAb titer is reduced to about 1-fold to about 4,000-fold as compared to a reference AAV. In another specific embodiment, the in vitro assay is an IVIg assay that determines a NC50, and wherein the NC50 increases from about 1-fold to about 600-fold as compared to a reference AAV.

[0010] In another aspect, provided herein is a member of an AAV clade, comprising: a VP1 amino acid sequence that has a least 90% sequence identity to a representative VP1 amino acid sequence of a AAV clade, and wherein the representative sequence is selected from any one of: SEQ ID NOs: 28, 10, 91, 7, 9, 4, 27, 3, 1, and 23. In one embodiment, the VP1 amino acid sequence has at least 95% identity to any one of: SEQ ID NOs: 28, 10, 91, 7, 9, 4, 27, 3, 1, and 23. In another embodiment, the VP1 amino acid sequence has at least 98% identity to any one of: SEQ ID NOs: 28, 10, 91, 7, 9, 4, 27, 3, 1, and 23. In another embodiment, the VP1 amino acid sequence has at least 99% identity to any one of: SEQ ID NOs: 28, 10, 91, 7, 9, 4, 27, 3, 1, and 23. In specific embodiments, the VP1 amino acid sequence comprises one or more of the amino acid modifications listed in Table 2. In specific embodiments, the VP1 amino acid sequence modifications are limited to the ones listed in Table 2. In specific embodiments, the AAV clade member further comprises the ability to evade AAV humoral immunity as determined in an in vitro assay. In a specific embodiment, the in vitro assay is an IVIg assay that determines a percent (%) transduction, and wherein the % transduction is about 2% to about 500% greater transduction as compared to a reference AAV at a given IVIg concentration. In another specific embodiment, the in vitro assay is an IVIg assay that determines a neutralizing antibody (Nab) titer, and wherein the NAb titer is reduced to about 1-fold to about 4,000-fold as compared to a reference AAV. In another specific embodiment, the in vitro assay is an IVIg assay that determines a NC₅₀, and wherein the NC₅₀ increases from about 1-fold to about 600-fold as compared to a reference AAV.

[0011] In another aspect, provided herein is a member of an adeno-associated virus (AAV) clade, comprising: a VP1 amino acid sequence that has a variable region amino acid sequence, wherein the variable region amino acid sequence has substantial sequence similarity or identity to a variable region amino acid sequence in any one of: SEQ ID NOs: 12-127 and 361-362. In one embodiment, the variable region amino acid sequence is selected from any one of VRI-VRIX, a GBS region, or a GH loop, or a combination thereof. In certain embodiments, the any one of VRI-VRIX sequence has at least 90% sequence similarity or identity to any one of VRI-VRIX of any one of SEQ ID NOs: 12-127 and 361-362. In some embodiments, the GBS region sequence has at least 90% sequence similarity or identity to the GBS region of any one of SEQ ID NOs: 12-127 and 361-362. In certain embodiments, the GH loop sequence has at least 90% sequence similarity or identity to the GH loop of any one of SEQ ID NOs: 12-127 and 361-362. In specific embodiments, the AAV clade member further comprises the ability to evade AAV humoral immunity as determined in an in vitro assay. In a specific embodiment, the in vitro assay is an IVIg assay that determines a percent (%) transduction, and wherein the % transduction is about 2% to about 500% greater transduction as compared to a reference AAV at a given IVIg concentration. In another specific embodiment, the in vitro assay is an IVIg assay that determines a neutralizing antibody (Nab) titer, and wherein the NAb titer is reduced to about 1-fold to about 4,000-fold as compared to a reference AAV. In another specific embodiment, the in vitro assay is an IVIg assay that determines a NC₅₀, and wherein the NC₅₀ increases from about 1-fold to about 600-fold as compared to a reference AAV.

[0012] In another aspect, provided herein is a member of an AAV clade, comprising: a first VP1 amino acid sequence that is phylogenetically related to a second VP1 amino acid sequence as determined by Neighbor-joining method, wherein the first VP1 amino acid sequence has a genetic distance to the second VP1 amino acid sequence as provided in Table 3. In one embodiment, the genetic distance is the mean genetic distance within the same AAV clade, as provided in Table 3. In another embodiment, the genetic distance is a range from about the min genetic distance within the same clade to about the max genetic distance within the same clade, as provided in Table 3. In certain embodiments, the second VP1 amino acid sequence comprises a VP1 amino acid sequence of any one of: SEQ ID NOs: 1-180 and 361-362. In specific embodiments, the AAV clade member further comprises the ability to evade AAV humoral immunity as determined in an in vitro assay. In a specific embodiment, the in vitro assay is an IVIg assay that determines a percent (%) transduction, and wherein the % transduction is about 2% to about 500% greater transduction as compared to a reference AAV at a given IVIg concentration. In another specific embodiment, the in vitro assay is an IVIg assay that determines a neutralizing antibody (Nab) titer, and wherein the NAb titer is reduced to about 1-fold to about 4,000-fold as compared to a reference AAV. In another specific embodiment, the in vitro assay is an IVIg assay that determines a NC₅₀, and wherein the NC₅₀ increases from about 1-fold to about 600-fold as compared to a reference AAV.

[0013] In another aspect, provided herein is a member of an AAV branch, comprising: a first VP1 amino acid sequence that is phylogenetically related to a second VP1 amino acid sequence as determined by Neighbor-joining method, wherein the first VP1 amino acid sequence has a genetic distance to the second VP1 amino acid sequence as provided in Table 3. In one embodiment, the genetic distance is the mean genetic distance within the same branch as provided in Table 3. In another embodiment, the genetic distance is a range from about the min genetic distance within the same branch to about the max genetic distance within the same branch as provided in Table 3. In certain embodiments, the second VP1 amino acid sequence comprises a VP1 amino acid sequence of any one of SEQ ID NOs: 1-180 and 361-362. In specific embodiments, the AAV branch member further comprises the ability to evade AAV humoral immunity as determined in an in vitro assay. In a specific embodiment, the in vitro assay is an IVIg assay that determines a percent (%) transduction, and wherein the % transduction is about 2% to about 500% greater transduction as compared to a reference AAV at a given IVIg concentration. In another specific embodiment, the in vitro assay is an IVIg assay that determines a neutralizing antibody (Nab) titer, and wherein the NAb titer is reduced to about 1-fold to about 4,000-fold as compared to a reference AAV. In another specific embodiment, the in vitro assay is an IVIg assay that determines a NC₅₀, and wherein the NC₅₀ increases from about 1-fold to about 600-fold as compared to a reference AAV.

[0014] In another aspect, provided herein is an AAV capsid protein, comprising: (a) a VP1 amino acid sequence that has at least 90% identity to a VP1 amino acid sequence set forth in Table 9 which is identified by a “BCD_” prefix, (b) a VP2 amino acid sequence that has at least 90% identity to the VP2 amino acid sequence of the amino acid sequence set forth in Table 9 which is identified by a “BCD_” prefix, or (c) a VP3 amino acid sequence that has at least 90% identity to the VP3 amino acid sequence of the amino acid sequence set forth in Table 9 which is identified by a “BCD_” prefix. In some embodiments, provided herein is an AAV capsid protein, comprising: (a) a VP1 amino acid sequence that has at least 91% identity to a VP1 amino acid sequence set forth in Table 9 which is identified by a “BCD_” prefix, (b) a VP2 amino acid sequence that has at least 91% identity to the VP2 amino acid sequence of the amino acid sequence set forth in Table 9 which is identified by a “BCD_” prefix, or (c) a VP3 amino acid sequence that has at least 91% identity to the VP3 amino acid sequence of the amino acid sequence set forth in Table 9 which is identified by a “BCD_” prefix. In some embodiments, provided herein is an AAV capsid protein, comprising: (a) a VP1 amino acid sequence that has at least 92% identity to a VP1 amino acid sequence set forth in Table 9 which is identified by a “BCD_” prefix, (b) a VP2 amino acid sequence that has at least 92% identity to the VP2 amino acid sequence of the amino acid sequence set forth in Table 9 which is identified by a “BCD_” prefix, or (c) a VP3 amino acid sequence that has at least 92% identity to the VP3 amino acid sequence of the amino acid sequence set forth in Table 9 which is identified by a “BCD_” prefix. In some embodiments, provided herein is an AAV capsid protein, comprising: (a) a VP1 amino acid sequence that has at least 93% identity to a VP1 amino acid sequence set forth in Table 9 which is identified by a “BCD_” prefix, (b) a VP2 amino acid sequence that has at least 93% identity to the VP2 amino acid sequence of the amino acid sequence set forth in Table 9 which is identified by a “BCD_” prefix, or (c) a VP3 amino acid sequence that has at least 93% identity to the VP3 amino acid sequence of the amino acid sequence set forth in Table 9 which is identified by a “BCD_” prefix. In some embodiments, provided herein is an AAV capsid protein, comprising: (a) a VP1 amino acid sequence that has at least 94% identity to a VP1 amino acid sequence set forth in Table 9 which is identified by a “BCD_” prefix, (b) a VP2 amino acid sequence that has at least 94% identity to the VP2 amino acid sequence of the amino acid sequence set forth in Table 9 which is identified by a “BCD_” prefix, or (c) a VP3 amino acid sequence that has at least 94% identity to the VP3 amino acid sequence of the amino acid sequence set forth in Table 9 which is identified by a “BCD_” prefix. In some embodiments, the amino acid set forth in Table 9 is one discussed in the Example section, infra. In some embodiments, the amino acid sequence set forth in Table 9 is BCD_0126, BCD_0282, BCD_0176, BCD_0446, BCD_0160, BCD_0195, BCD_0180, BCD_0192, BCD_0185, BCD_0454, BCD_0277, BCD_0174, BCD_0167, BCD_0126, BCD_0125, BCD_0193, BCD_0286, BCD_0182, BCD_0283, BCD_0106, or BCD_0361.

[0015] In some embodiments, provided herein is an AAV capsid protein, comprising: (a) a VP1 amino acid sequence that has at least 95% identity to a VP1 amino acid sequence set forth in Table 9 which is identified by a “BCD_” prefix, (b) a VP2 amino acid sequence that has at least 95% identity to the VP2 amino acid sequence of the amino acid sequence set forth in Table 9 which is identified by a “BCD_” prefix, or (c) a VP3 amino acid sequence that has at least 95% identity to the VP3 amino acid sequence of the amino acid sequence set forth in Table 9 which is identified by a “BCD_” prefix. In some embodiments, provided herein is an AAV capsid protein, comprising: (a) a VP1 amino acid sequence that has at least 96% identity to a VP1 amino acid sequence set forth in Table 9 which is identified by a “BCD_” prefix, (b) a VP2 amino acid sequence that has at least 96% identity to the VP2 amino acid sequence of the amino acid sequence set forth in Table 9 which is identified by a “BCD_” prefix, or (c) a VP3 amino acid sequence that has at least 96% identity to the VP3 amino acid sequence of the amino acid sequence set forth in Table 9 which is identified by a “BCD_” prefix. In some embodiments, provided herein is an AAV capsid protein, comprising: (a) a VP1 amino acid sequence that has at least 97% identity to a VP1 amino acid sequence set forth in Table 9 which is identified by a “BCD_” prefix, (b) a VP2 amino acid sequence that has at least 97% identity to the VP2 amino acid sequence of the amino acid sequence set forth in Table 9 which is identified by a “BCD_” prefix, or (c) a VP3 amino acid sequence that has at least 97% identity to the VP3 amino acid sequence of the amino acid sequence set forth in Table 9 which is identified by a “BCD_” prefix. In some embodiments, provided herein is an AAV capsid protein, comprising: (a) a VP1 amino acid sequence that has at least 98% identity to a VP1 amino acid sequence set forth in Table 9 which is identified by a “BCD_” prefix, (b) a VP2 amino acid sequence that has at least 98% identity to a VP2 amino acid sequence of the amino acid sequence set forth in Table 9 which is identified by a “BCD_” prefix, or (c) a VP3 amino acid sequence that has at least 98% identity to a VP3 amino acid sequence of the amino acid sequence set forth in Table 9 which is identified by a “BCD_” prefix. In some embodiments, provided herein is an AAV capsid protein, comprising: (a) a VP1 amino acid sequence that has at least 99% identity to a VP1 amino acid sequence set forth in Table 9 which is identified by a “BCD_” prefix, (b) a VP2 amino acid sequence that has at least 99% identity to a VP2 amino acid sequence of the amino acid sequence set forth in Table 9 which is identified by a “BCD_” prefix, or (c) a VP3 amino acid sequence that has at least 99% identity to a VP3 amino acid sequence of the amino acid sequence set forth in Table 9 which is identified by a “BCD_” prefix. In some embodiments, provided herein is an AAV capsid protein, comprising: (a) a VP1 amino acid sequence comprising a VP1 amino acid sequence set forth in Table 9 which is identified by a “BCD_” prefix, (b) a VP2 amino acid sequence that comprising a VP2 amino acid sequence of the amino acid sequence set forth in Table 9 which is identified by a “BCD_” prefix, or (c) a VP3 amino acid sequence comprising a VP3 amino acid sequence of the amino acid sequence set forth in Table 9 which is identified by a “BCD_” prefix. In some embodiments, the amino acid set forth in Table 9 is one discussed in the Example section, infra. In some embodiments, the amino acid sequence set forth in Table 9 is BCD_0126, BCD_0282, BCD_0176, BCD_0446, BCD_0160, BCD_0195, BCD_0180, BCD_0192, BCD_0185, BCD_0454, BCD_0277, BCD_0174, BCD_0167, BCD_0126, BCD_0125, BCD_0193, BCD_0286, BCD_0182, BCD_0283, BCD_0106, or BCD_0361.

[0016] In another aspect, provided herein is an AAV capsid protein, comprising: (a) a VP1 amino acid sequence that has at least 90% identity to the VP1 amino acid sequence of any one of SEQ ID NOs: 12-127 and 361-362, (b) a VP2 amino acid sequence that has at least 90% identity to the VP2 amino acid sequence of the VP2 sequence of any one of SEQ ID NOs: 12-127 and 361-362, or (c) a VP3 amino acid sequence that has at least 90% identity to the VP3 amino acid sequence of any one of SEQ ID NOs: 12-127 and 361-362. In one embodiment, the AAV capsid protein comprises: (a) a VP1 amino acid sequence that has at least 95% identity to the VP1 amino acid sequence of any one of SEQ ID NOs: 12-127 and 361-362, (b) a VP2 amino acid sequence that has at least 95% identity to the VP2 amino acid sequence of ay one of SEQ ID NOs: 12-127 and 361-362, or (c) a VP3 amino acid sequence that has at least 95% identity to the VP3 amino acid sequence of any one of SEQ ID NOs: 12-127 and 361-362. In another embodiment, the AAV capsid protein comprises: (a) a VP1 amino acid sequence that has at least 98% identity to the VP1 amino acid sequence of any one of SEQ ID NOs: 12-127 and 361-362, (b) a VP2 amino acid sequence that has at least 98% identity to the VP2 amino acid sequence of any one of SEQ ID NOs: 12-127 and 361-362, or (c) a VP3 amino acid sequence that has at least 98% identity to the VP3 amino acid sequence of any one of SEQ ID NOs: 12-127 and 361-362. In another embodiment, the AAV capsid protein comprises a VP1, VP2, or VP3 amino acid sequence that is a VP1, VP2 or VP3 amino acid sequence of any one of SEQ ID NOs: 12-127 and 361-362. In certain embodiments, the VP1, VP2, or VP3 amino acid sequence comprises a variable region amino acid sequence, and wherein the variable region amino acid sequence is a VRI-VRIX of any one of: SEQ ID NOs: 12-127 and 361-362. In a specific embodiment, the VP1, VP2, or VP3 amino acid sequence comprises a GBS region amino acid sequence, and wherein the GBS region amino acid sequence is a GBS region of any one of: SEQ ID NOs: 12-127 and 361-362. In another specific embodiment, the VP1, VP2, or VP3 amino acid sequence comprises a GH loop amino acid sequence, and wherein the GH loop amino acid sequence is a GH loop selected from any one of: SEQ ID NOs: 12-127 and 361-362. In specific embodiments, the AAV capsid protein further comprises the ability to evade AAV humoral immunity as determined by an in vitro assay. In a specific embodiment, the in vitro assay is an IVIg assay that determines a percent (%) transduction, and wherein the % transduction is about 2% to about 500% greater transduction as compared to a reference AAV at a given IVIg concentration. In another specific embodiment, the in vitro assay is an IVIg assay that determines a NC₅₀, and wherein the NAb titer is reduced to about 1-fold to about 4,000-fold as compared to a reference AAV. In another specific embodiment, the in vitro assay is an IVIg assay that determines a NC₅₀, and wherein the NC₅₀ increases from about 1-fold to about 600-fold as compared to a reference AAV.

[0017] In another embodiment, provided herein is an AAV capsid protein, comprising: (a) a VP1 amino acid sequence that has at least 90% identity to the VP1 amino acid sequence of any one of SEQ ID NOs12-127 and 361-362, (b) a VP2 amino acid sequence that has at least 90% identity to the VP2 amino acid sequence of the VP2 sequence of any one of SEQ ID NOs: 12-127 and 361-362, or (c) a VP3 amino acid sequence that has at least 90% identity to the VP3 amino acid sequence of any one of SEQ ID NOs: 12-127 and 361-362, wherein one or more variable regions of the VP1 amino acid sequence, VP2 amino acid sequence, or VP3 amino acid sequence is identical to the one or more variable regions of the amino acid sequence to which the VP1 amino acid sequence, VP2 amino acid sequence, or VP3 amino acid sequence has 90% identity. In one embodiment, the AAV capsid protein comprises: (a) a VP1 amino acid sequence that has at least 95% identity to the VP1 amino acid sequence of any one of SEQ ID NOs: 12-127 and 361-362, (b) a VP2 amino acid sequence that has at least 95% identity to the VP2 amino acid sequence of any one of SEQ ID NOs: 12-127 and 361-362, and (c) a VP3 amino acid sequence that has at least 95% identity to the VP3 amino acid sequence of any one of SEQ ID NOs: 12-127 and 361-362, wherein one or more variable regions of the VP1 amino acid sequence, VP2 amino acid sequence, or VP3 amino acid sequence is identical to the one or more variable regions of the amino acid sequence to which the VP1 amino acid sequence, VP2 amino acid sequence, or VP3 amino acid sequence has 95% identity. In another embodiment, the AAV capsid protein comprises: (a) a VP1 amino acid sequence that has at least 98% identity to the VP1 amino acid sequence of any one of SEQ ID NOs: 12-127 and 361-362, (b) a VP2 amino acid sequence that has at least 98% identity to the VP2 amino acid sequence of any one of SEQ ID NOs: 12-127 and 361-362, and (c) a VP3 amino acid sequence that has at least 98% identity to the VP3 amino acid sequence of any one of SEQ ID NOs: 12-127 and 361-362, wherein one or more variable regions of the VP1 amino acid sequence, VP2 amino acid sequence, or VP3 amino acid sequence is identical to the one or more variable regions of the amino acid sequence to which the VP1 amino acid sequence, VP2 amino acid sequence, or VP3 amino acid sequence has 98% identity. In some embodiments, the one or more variable regions is one or more of VRI-VRIX. In some embodiments, the one or more variable regions is two, three, four, five, or more of VRI-VRIX. In some embodiments, the one or more variable regions is six, seven, or eight of VRI-VRIX. In some embodiments, the one or more variable regions is VRI-VRIX. In some embodiments, the one or more variable regions is a GBS region. In some embodiments, the one or more variable regions is a GH loop. In some embodiments, the one or more variable regions is a GBS region and a GH loop. In some embodiments, the one or more variable regions is one or more of VRI-VRIX, and a GBS region. In some embodiments, the one or more variable regions is one or more of VRI-VRIX, and a GH loop. In some embodiments, the one or more variable regions is one or more of VRI-VRIX, GBS loop, and a GH loop. In specific embodiments, the AAV capsid protein comprises the ability to evade AAV humoral immunity as determined by an in vitro assay. In a specific embodiment, the in vitro assay is an IVIg assay that determines a percent (%) transduction, and wherein the % transduction is about 2% to about 500% greater transduction as compared to a reference AAV at a given IVIg concentration. In another specific embodiment, the in vitro assay is an IVIg assay that determines a NC₅₀, and wherein the NAb titer is reduced to about 1-fold to about 4,000-fold as compared to a reference AAV. In another specific embodiment, the in vitro assay is an IVIg assay that determines a NC₅₀, and wherein the NC₅₀ increases from about 1-fold to about 600-fold as compared to a reference AAV.

[0018] In some embodiments, an AAV capsid protein provided herein comprises a VP1 amino acid sequence, a VP2 amino acid sequence, and a VP3 amino acid sequence.

[0019] In another aspect, provided herein is a nucleotide sequence encoding an AAV clade member described herein, AAV branch member described herein, or AAV capsid protein described herein. In specific embodiments, an AAV clade member, AAV branch member, or AAV capsid protein comprises a VP1 amino acid sequence, a VP2 amino acid sequence, or a VP3 amino acid sequence of a VP1 amino acid sequence, a VP2 amino acid sequence, or a VP3 amino acid sequence of a capsid protein provided herein (e.g., in Table 9) with the “BCD” prefix.

[0020] In another aspect, provided herein is a vector comprising a nucleotide sequence encoding an AAV clade member described herein, AAV branch member described herein, or AAV capsid protein described herein. In specific embodiments, the vector further comprises a heterologous regulatory sequence that controls expression of the capsid protein in a host cell. In one embodiment, provided herein is a vector comprising: (a) a nucleotide sequence encoding a VP1 amino acid sequence of the AAV clade member described herein; and (b) a heterologous regulatory sequence that controls expression of the capsid protein in a host cell. In another embodiment, provided herein is a vector, comprising: (a) a nucleotide sequence encoding a VP1 amino acid sequence of the AAV branch member described herein; and (b) a heterologous regulatory sequence that controls expression of the capsid protein in a host cell. In another embodiment, provided herein is a vector, comprising: (a) a nucleotide sequence encoding a VP1, VP2, or VP3 capsid protein that has at least 90% identity to the VP1, VP2, or VP3 of any one of SEQ ID NOs: 12-127 and 361-362; and (b) a heterologous regulatory sequence that controls expression of the capsid protein in a host cell. In another embodiment, provided herein is a vector, comprising: (a) a nucleotide sequence encoding a VP1, VP2, or VP3 capsid protein that has at least 91%, at least 92%, at least 93%, at least 94%, at least 95%, at least 96%, at least 97%, at least 98%, or at least 99% identity to the VP1, VP2, or VP3 of any one of SEQ ID NOs: 12-127 and 361-362; and (b) a heterologous regulatory sequence that controls expression of the capsid protein in a host cell. In another embodiment, provided herein is a vector, comprising: (a) a nucleotide sequence encodes a VP1, VP2, or VP3 capsid protein that has at least 95% identity to the VP1, VP2, or VP3 of any one of SEQ ID NOs: 12-127 and 361-362; and (b) a heterologous regulatory sequence that controls expression of the capsid protein in a host cell. In another embodiment, provided herein is a vector, comprising: (a) a nucleotide sequence encodes a VP1, VP2, or VP3 capsid protein that has at least 98% identity to the VP1, VP2, or VP3 of any one of SEQ ID NOs: 12-127 and 361-362; and (b) a heterologous regulatory sequence that controls expression of the capsid protein in a host cell. In certain embodiments, the vector further comprises a transgene comprising a nucleotide sequence encoding a biomolecule operably linked to a heterologous regulatory sequence that controls expression of the capsid protein in a host cell.

[0021] In another aspect, provided herein are host cells comprising a nucleotide sequence encoding a VP1, VP2, or VP3 capsid protein described herein, or a vector described herein. In a specific embodiment, provided herein are in vitro or ex vivo host cells comprising a nucleotide sequence encoding a VP1, VP2, or VP3 capsid protein described herein, or a vector described herein.

[0022] In another aspect, provided herein are AAV viral particles comprising an AAV clade member described herein, an AAV branch member, or an AAV capsid protein described herein. In one embodiment, provided herein is a recombinant AAV viral particle, comprising: (a) a capsid, wherein the capsid comprises a VP1 amino acid sequence of the AAV clade member described herein; and (b) an rAAV vector genome comprising a nucleotide sequence encoding a biomolecule operably linked to a heterologous regulatory sequence that controls expression of the nucleotide sequence in a host cell. In another embodiment, provided herein is a recombinant AAV viral particle, comprising: (a) a capsid, wherein the capsid comprises a VP1 amino acid sequence of the AAV branch member described herein; and (b) an rAAV vector genome comprising a nucleotide sequence encoding a biomolecule operably linked to a heterologous regulatory sequence that controls expression of the nucleotide sequence in a host cell. In another embodiment, provided herein is a recombinant AAV viral particle, comprising: (a) the AAV capsid protein described herein; and (b) an rAAV vector genome comprising a nucleotide sequence encoding a biomolecule operably linked to a heterologous regulatory sequence that controls expression of the nucleotide sequence in a host cell. In some embodiments, a recombinant AAV viral particle comprises (a) a capsid, wherein the capsid comprises a VP1 amino acid sequence, a VP2 amino acid sequence, or a VP3 amino acid sequence of the AAV clade member described herein; and (b) a rAAV vector genome comprising a nucleotide sequence encoding a biomolecule operably linked to a heterologous regulatory sequence that controls expression of the nucleotide sequence in a host cell. In specific embodiments, a recombinant AAV viral particle comprises (a) a capsid, wherein the capsid comprises a VP1 amino acid sequence, a VP2 amino acid sequence, and a VP3 amino acid sequence of the AAV clade member described herein; and (b) a rAAV vector genome comprising a nucleotide sequence encoding a biomolecule operably linked to a heterologous regulatory sequence that controls expression of the nucleotide sequence in a host cell. In specific embodiments, the rAAV vector genome comprises an AAV inverted terminal repeat or a fragment thereof. In a specific embodiment, the AAV inverted terminal repeat is a 5′ AAV inverted terminal repeat selected from Table 4. In another specific embodiment, the AAV inverted terminal repeat is a 3′ AAV inverted terminal repeat selected from Table 4. In certain embodiments, the rAAV vector genome comprises a 5′ AAV inverted terminal repeat or a fragment thereof, and a 3′ AAV terminal repeat or a fragment thereof. In a specific embodiment, the 5′ AAV inverted terminal repeat and the 3′ AAV inverted terminal repeat are selected from a 5′ AAV terminal repeat and a 3′ AAV terminal repeat, respectively, provided in Table 4. In certain embodiments, the biomolecule is selected from a therapeutic protein, an enzyme, a peptide, an RNA, a component of CRISPR gene editing system, an antisense oligonucleotides (AONs), an AON-mediated exon skipping, a poison exon, or a dominant negative mutant protein. In some embodiments, the therapeutic protein is endogenously expressed in one or more of a muscle, heart, brain, plasma, kidney, liver, ear, or cancer cell of a subject. In a specific embodiment, the therapeutic protein is a functional version of the endogenously expressed protein. In certain embodiments, the recombinant AAV viral particle has enhanced tropism to the muscle cell as compared to a reference AAV. In some embodiments, the recombinant AAV viral particle has enhanced tropism to the heart cell as compared to a reference AAV. In certain embodiments, the recombinant AAV viral particle has enhanced tropism to the brain cell as compared to a reference AAV. In some embodiments, the recombinant AAV viral particle has enhanced tropism to the plasma cell as compared to a reference AAV. In certain embodiments, the recombinant AAV viral particle has enhanced tropism to the kidney cell as compared to a reference AAV. In some embodiments, the recombinant AAV viral particle has enhanced tropism to the liver cell as compared to a reference AAV. In certain embodiments, the recombinant AAV viral particle de-targets cells in a subject other than the cell for which the rAAV has enhanced tropism. In specific embodiments, the de-targeted cell is selected from one or more of a muscle, heart, brain, plasma, kidney, or liver cell. In specific embodiments, the recombinant AAV viral particle has the ability to evade AAV humoral immunity as determined by an in vitro assay. In a specific embodiment, the in vitro assay is an IVIg assay that determines a percent (%) transduction, and wherein the % transduction is about 2% to about 500% greater transduction as compared to a reference AAV at a given IVIg concentration. In another specific embodiment, the in vitro assay is an IVIg assay that determines a NC₅₀, and wherein the NAb titer is reduced to about 1-fold to about 4,000-fold as compared to a reference AAV. In another specific embodiment, the in vitro assay is an IVIg assay that determines a NC₅₀, and wherein the NC₅₀ increases from about 1-fold to about 600-fold as compared to a reference AAV.

[0023] In another aspect, provided herein is an in vitro cell(s) or tissue comprising a recombinant AAV viral particle described herein. In another aspect, provided herein is an ex vivo cell(s) or tissue comprising a recombinant AAV viral particle described herein.

[0024] In another aspect, provided herein are cultured host cells comprising a recombinant nucleic acid molecule encoding an AAV capsid protein described herein. In one embodiment, provided herein is a cultured host cell comprising a recombinant nucleic acid molecule encoding an AAV VP1 capsid protein comprising a sequence comprising: (a) the full length VP1 protein of any one of SEQ ID NOs: 12-127 and 361-362; or (b) an amino acid sequence with at least 95% identity to the full length VP1 capsid protein of any one of SEQ ID NOs: 12-127 and 361-362, wherein the recombinant nucleic acid molecule further comprises a heterologous sequence. In another embodiment, provided herein is a cultured host cell, comprising a recombinant nucleic acid molecule encoding an AAV VP2 capsid protein comprising: (a) a sequence comprising the full length VP2 protein of any one of SEQ ID NOs: 12-127 and 361-362; or (b) an amino acid sequence with at least 95% identity to the full length VP2 capsid protein of any one of SEQ ID NOs: 12-127 and 361-362, wherein the recombinant nucleic acid molecule further comprises a heterologous sequence. In another embodiment, provided herein is a cultured host cell, comprising a recombinant nucleic acid molecule encoding an AAV VP3 capsid protein comprising: (a) a sequence comprising the full length VP3 protein of any one of SEQ ID NOs: 12-127 and 361-362; or (b) an amino acid sequence with at least 95% identity to the full length VP3 capsid protein of any one of SEQ ID NOs: 12-127 and 361-362, wherein the recombinant nucleic acid molecule further comprises a heterologous sequence. In specific embodiments, the amino acid residues varied in the AAV VP1, VP2, or VP3 capsid protein with at least 95% identity to the full length VP1, VP2, or VP3 capsid protein of any one of SEQ ID NOs: 12-127 and 361-362 are selected from Table 2. In specific embodiments, the heterologous sequence is a heterologous nucleotide sequence, which is heterologous to the nucleotide sequence encoding the AAV capsid protein. In specific embodiments, the heterologous sequence is a heterologous nucleotide sequence, which encodes an amino acid sequence that is heterologous to the AAV capsid protein.

[0025] In another embodiment, provided herein is a cultured host cell containing a recombinant nucleic acid molecule, comprising: (a) nucleotides of a full length AAV VP1 capsid protein of any one of SEQ ID NOs: 192-307 and 363-364; or (b) a sequence at least 95% identical to nucleotides of the full length VP1 capsid protein of any one of SEQ ID NOs: 192-307 and 363-364, wherein the recombinant nucleic acid molecule further comprises a heterologous sequence. In another embodiment, provided herein is a cultured host cell containing a recombinant nucleic acid molecule, comprising: (a) nucleotides of a full length AAV VP2 capsid protein of any one of SEQ ID NOs: 192-307 and 363-364; or (b) a sequence at least 95% identical to nucleotides of the full length VP2 capsid protein of any one of SEQ ID NOs: 192-307 and 363-364, wherein the recombinant nucleic acid molecule further comprises a heterologous sequence. In another embodiment, provided herein is a cultured host cell containing a recombinant nucleic acid molecule, comprising: nucleotides of a full length AAV VP3 capsid protein of any one of SEQ ID NOs: 192-307 and 363-364; or a sequence at least 95% identical to nucleotides of the full length VP3 capsid protein of any one of SEQ ID NOs: 192-307 and 363-364, wherein the recombinant nucleic acid molecule further comprises a heterologous sequence. In specific embodiments, nucleic acids varied in the AAV VP1, VP2, or VP3 capsid protein with at least 95% identity to the full length VP1, VP2, or VP3 capsid protein of any one of SEQ ID NOs: 192-307 and 363-364 are selected from nucleic acids encoding the amino acid residues that vary in Table 2. In specific embodiments, the heterologous sequence is a heterologous nucleotide sequence, which is heterologous to the nucleotide sequence encoding the AAV capsid protein. In specific embodiments, the heterologous sequence is a heterologous nucleotide sequence, which encodes an amino acid sequence that is heterologous to the AAV capsid protein.

[0026] In another aspect, provided herein are compositions comprising a recombinant AAV viral particle described herein. In one embodiment, provided herein is a composition, comprising: (a) a recombinant AAV viral particle described herein; and (b) a physiologically acceptable carrier.

[0027] In another aspect, provided herein is a method of delivering a biomolecule to a cell in vitro, comprising: transducing the cell with a recombinant AAV viral particle described herein. In some embodiments, the cell is one or more of a muscle cell, heart cell, brain cell, plasma cell, kidney cell, liver cell, ear cell, or cancer cell. In certain embodiments, the cell is one or more of a muscle, heart, brain, plasma, kidney, liver, or cancer cell.

[0028] In another aspect, provided herein is a method of delivering a biomolecule to a cell ex vivo, comprising transducing the cell with a recombinant AAV viral particle described herein. In some embodiments, the cell is one or more of a muscle cell, heart cell, brain cell, plasma cell, kidney cell, liver cell, ear cell, or cancer cell. In certain embodiments, the cell is one or more of a muscle, heart, brain, plasma, kidney, liver, or cancer cell.

[0029] In another aspect, provided herein is a method of delivering a biomolecule to a cell in a subject, comprising: administering a recombinant AAV viral particle described herein to the cell in the subject. In some embodiments, the cell is one or more of a muscle cell, heart cell, brain cell, plasma cell, kidney cell, liver cell, ear cell, or cancer cell. In certain embodiments, the cell is one or more of a muscle, heart, brain, plasma, kidney, liver, or cancer cell. In certain embodiments, the subject is a human subject. In other embodiments, the subject is a non-human subject.

[0030] In another aspect, provided herein is a method of treating a disease or disorder, comprising administering a recombinant AAV viral particle described herein to a subject. In certain embodiments, the subject is a human subject. In other embodiments, the subject is a non-human subject.

[0031] In another aspect, provided herein are methods for producing a recombinant AAV (rAAV) viral particle described herein. In one embodiment, provided herein is a method for producing a recombinant AAV viral particle, comprising: culturing a host cell comprising one or more vectors or rAAV vector genomes for generating the rAAV viral particle, wherein the one or more vectors or rAAV vector genomes comprises a nucleotide sequence encoding an AAV capsid protein described herein. In another embodiment, provided herein is a method for producing a rAAV viral particle, comprising: culturing a host cell comprising one or more vectors or rAAV vector genomes for generating the rAAV viral particle, wherein the one or more vectors or rAAV vector genomes comprises a nucleotide sequence encoding a VP1 protein of an AAV clade member described herein. In another embodiment, provided herein is a method for producing a rAAV viral particle, comprising: culturing a host cell comprising one or more vectors or rAAV vector genomes for generating the rAAV viral particle, wherein the one or more vectors or rAAV vector genomes comprises a nucleotide sequence encoding a VP1 protein of an AAV branch member described herein. In certain embodiments, the one or more vectors further comprises a nucleotide sequence used by the host cell to generate a rAAV viral particle, and wherein the nucleotide sequence is operably linked to a heterologous regulatory sequence that controls expression of the nucleotide sequence in a host cell. In some embodiments, prior to the culturing step the host cell is transfected with the one or more vector or rAAV vector genomes. In certain embodiments, the rAAV viral particle is isolated from the host cell.

### 5. BRIEF DESCRIPTION OF THE DRAWINGS

[0032] FIG. 1 shows an overview of the approaches used to discover and/or produce the novel AAV capsid sequences.

[0033] FIG. 2 shows a diagram of the workflow used in the identification and characterization of novel AAV capsid proteins and viral particles.

[0034] FIGS. 3A-3C show a phylogenetic tree diagram of branch 2 constructed using the AAV VP1 capsid protein and Neighbor-Joining method, grouped in clades based on their common ancestry as determined by the Jukes-Cantor model.

[0035] FIGS. 4A-4L show an alignment of the VP1 protein for AAV clade 0. VP1 protein of BCD_0454 (SEQ ID NO:114); BCD_0446 (SEQ ID NO:109); BCD_0455 (SEQ ID NO: 115); BCD_0190 (SEQ ID NO:51); BCD_0192 (SEQ ID NO:52); BCD_0160 (SEQ ID NO: 28); BCD_0161 (SEQ ID NO:29); BMN_0273 (SEQ ID NO:160); BMN_0271 (SEQ ID NO: 158); BMN_0265 (SEQ ID NO:152); BMN_0272 (SEQ ID NO:159); BCD_0299 (SEQ ID NO: 84); BCD_0300 (SEQ ID NO:85); BCD_0301 (SEQ ID NO:86); BMN_0261 (SEQ ID NO: 148); BMN_0266 (SEQ ID NO:153); BMN_0262 (SEQ ID NO:149); BCD_0285 (SEQ ID NO: 70); BCD_0281 (SEQ ID NO:66); BMN_0269 (SEQ ID NO:156); BMN_0268 (SEQ ID NO: 155); BMN_0267 (SEQ ID NO:154); BMN_0264 (SEQ ID NO:151); BMN_0263 (SEQ ID NO: 150); BCD_0283 (SEQ ID NO:68); BCD_0282 (SEQ ID NO:67); BCD_0280 (SEQ ID NO: 65); BCD_0284 (SEQ ID NO:69); BMN_0270 (SEQ ID NO:157); BCD_0291 (SEQ ID NO: 76); BCD_0298 (SEQ ID NO:83); BCD_0295 (SEQ ID NO:80); BCD_0293 (SEQ ID NO: 78); BCD_0290 (SEQ ID NO:75); BCD_0287 (SEQ ID NO:72); BCD_0294 (SEQ ID NO: 79); BCD_0289 (SEQ ID NO:74); BCD_0286 (SEQ ID NO:71); BCD_0292 (SEQ ID NO: 77); BCD_0288 (SEQ ID NO:73); BCD_0165 (SEQ ID NO:30); BCD_0174 (SEQ ID NO: 37); BCD_0175 (SEQ ID NO:38); BCD_0278 (SEQ ID NO:63); BCD_0274 (SEQ ID NO: 59); BCD_0279 (SEQ ID NO:64); BCD_0296 (SEQ ID NO:81); BCD_0276 (SEQ ID NO: 61); BCD_0297 (SEQ ID NO:82); BCD_0275 (SEQ ID NO:60); and BCD_0277 (SEQ ID NO: 62) are aligned.

[0036] FIGS. 5A-5J show an alignment of the VP1 protein for AAV clade 1. VP1 protein of BCD_0386 (SEQ ID NO:94); BCD_0125 (SEQ ID NO:20); BCD_0193 (SEQ ID NO:53); BCD_0195 (SEQ ID NO:55); BMN_0305 (SEQ ID NO:164); BMN_0302 (SEQ ID NO:161); BMN_0303 (SEQ ID NO:162); BMN_0304 (SEQ ID NO:163); BMN_0310 (SEQ ID NO:169); BMN_0309 (SEQ ID NO:168); BMN_0307 (SEQ ID NO:166); BMN_0311 (SEQ ID NO:170); BMN_0306 (SEQ ID NO:165); BMN_0308 (SEQ ID NO:167); BMN_0314 (SEQ ID NO:173); BMN_0312 (SEQ ID NO:171); BMN_0313 (SEQ ID NO:172); BCD_0180 (SEQ ID NO:43); BMN_0315 (SEQ ID NO:174); BCD_0182 (SEQ ID NO:45); BCD_0185 (SEQ ID NO:46); BCD_0448 (SEQ ID NO:111); BCD_0198 (SEQ ID NO:58); BCD_0146 (SEQ ID NO:25); BCD_0127 (SEQ ID NO:22); AAV-10 (SEQ ID NO:10); BCD_0126 (SEQ ID NO:21); BCD_0449 (SEQ ID NO:112); BCD_0450 (SEQ ID NO:113); BCD_0181 (SEQ ID NO:44); BCD_0177 (SEQ ID NO:40); BCD_0197 (SEQ ID NO:57); BCD_0488 (SEQ ID NO:125); AAV-8 (SEQ ID NO:8); BCD_0486 (SEQ ID NO:123); BCD_0487 (SEQ ID NO:124); BCD_0186 (SEQ ID NO:47); BCD_0187 (SEQ ID NO:48); BMN_0218 (SEQ ID NO:138); BMN_0208 (SEQ ID NO:128); BMN_0214 (SEQ ID NO:134); BMN_0212 (SEQ ID NO:132); BMN_0211 (SEQ ID NO:131); BMN_0216 (SEQ ID NO:136); BMN_0210 (SEQ ID NO:130); BMN_0213 (SEQ ID NO:133); BMN_0209 (SEQ ID NO:129); BMN_0215 (SEQ ID NO:135); and BMN_0217 (SEQ ID NO:137) are aligned.

[0037] FIGS. 6A-6F show an alignment of the VP1 protein for AAV clade 4. VP1 protein of BCD_0361 (SEQ ID NO:92); BCD_0461 (SEQ ID NO:117); BCD_0389 (SEQ ID NO:95); BCD 0392 (SEQ ID NO:98); BCD_0413 (SEQ ID NO:103); BCD_0467 (SEQ ID NO:120); BCD_0354 (SEQ ID NO:89); BCD_0492 (SEQ ID NO:127); BCD_0390 (SEQ ID NO:96); BCD_0462 (SEQ ID NO:118); BCD_0468 (SEQ ID NO:121); BCD_0359 (SEQ ID NO:90); BCD_0396 (SEQ ID NO:102); BCD_0360 (SEQ ID NO:91); BCD_0391 (SEQ ID NO:97); BCD_0505 (SEQ ID NO:361); BCD_0106 (SEQ ID NO:13); BCD_0415 (SEQ ID NO:105); BCD_0466 (SEQ ID NO:119); AAV-po.6 (SEQ ID NO:2); BCD_0443 (SEQ ID NO:108); BCD_0353 (SEQ ID NO:88); BCD_0414 (SEQ ID NO:104); BCD_0351 (SEQ ID NO:87); BCD_0459 (SEQ ID NO: 116); BCD_0395 (SEQ ID NO:101); BCD_0393 (SEQ ID NO:99); BCD_0394 (SEQ ID NO:100); BCD_0362 (SEQ ID NO:93); and BCD_0506 (SEQ ID NO:362) are aligned.

[0038] FIGS. 7A-7D show an alignment of the VP1 protein for AAV clade 6. VP1 protein of AAV-7 (SEQ ID NO:7); BCD_0188 (SEQ ID NO:49); BCD_0176 (SEQ ID NO:39); BCD_0179 (SEQ ID NO:42); BMN_0254 (SEQ ID NO:142); BMN_0258 (SEQ ID NO:146); BMN_0253 (SEQ ID NO:141); BMN_0260 (SEQ ID NO:147); BMN_0257 (SEQ ID NO:145); BMN_0256 (SEQ ID NO:144); BMN_0255 (SEQ ID NO:143); BCD_0194 (SEQ ID NO:54); BMN_0251 (SEQ ID NO:140); BMN_0250 (SEQ ID NO:139); BCD_0485 (SEQ ID NO:122); BCD_0489 (SEQ ID NO: 126); BCD_0196 (SEQ ID NO:56); BCD_0120 (SEQ ID NO:19); BCD_0178 (SEQ ID NO:41); and BCD_0189 (SEQ ID NO:50) are aligned.

[0039] FIGS. 8A-8B show an alignment of the VP1 protein for AAV clade 11. VP1 protein of AAV-9 (SEQ ID NO:9); BCD_0112 (SEQ ID NO:14); BMN_0319 (SEQ ID NO:178); BMN_0316 (SEQ ID NO:175); BMN_0321 (SEQ ID NO:180); BMN_0317 (SEQ ID NO:176); BMN_0318 (SEQ ID NO:177); BMN_0320 (SEQ ID NO:179) are aligned.

[0040] FIGS. 9A-9B show an alignment of the VP1 protein for AAV clade 12. VP1 protein of BCD_0105 (SEQ ID NO:12); AAV-2 (SEQ ID NO:4); BCD_0137 (SEQ ID NO:24); and BCD_0447 (SEQ ID NO:110) are aligned.

[0041] FIGS. 10A-10B show an alignment of the VP1 protein for AAV clade 13. VP1 protein of BCD_0168 (SEQ ID NO:32); BCD_0169 (SEQ ID NO:33); BCD_0171 (SEQ ID NO: 35); BCD_0172 (SEQ ID NO:36); BCD_0170 (SEQ ID NO:34); BCD_0159 (SEQ ID NO: 27); and BCD_0167 (SEQ ID NO:31) are aligned.

[0042] FIGS. 11A-11B show an alignment of the VP1 protein for AAV clade 16. VP1 protein of BCD_0441 (SEQ ID NO:106); BCD_0442 (SEQ ID NO:107); AAV-1 (SEQ ID NO: 3); and AAV-6 (SEQ ID NO:6) are aligned.

[0043] FIGS. 12A-12B show an alignment of the VP1 protein for AAV clade 21. VP1 protein of BCD_0115 (SEQ ID NO:17); BCD_0113 (SEQ ID NO:15); BCD_0117 (SEQ ID NO: 18); BCD_0114 (SEQ ID NO:16); AAV-13 (SEQ ID NO:11); AAV-LK03 (SEQ ID NO:1); and AAV-3b (SEQ ID NO:5) are aligned.

[0044] FIG. 13 shows an alignment of the VP1 protein for AAV clade 22. VP1 protein of BCD_0135 (SEQ ID NO:23); and BCD_0157 (SEQ ID NO:26) are aligned.

[0045] FIGS. 14A-14B show in vitro IVIg neutralization data of selected rAAVs, including novel rAAV viral particles.

[0046] FIG. 15 shows a representative image of in vivo BCD_0160 expression in the brain.

### 6. DETAILED DESCRIPTION

### 6.1 General Overview

[0047] The present disclosure provides novel AAV capsid sequences (nucleic and amino acid sequences) and functional fragments thereof. Also provided herein, are novel AAV isolates, clades, and branches for broader use of AAV-based vectors in biomedical applications, such as gene therapy, which provide improved functional characteristics over previously described AAV-based vectors.

[0048] The disclosure also provides rAAV viral particles, vectors, rAAV vector genome constructs, host cells, and pharmaceutical compositions. The novel AAV capsid based vectors and/or rAAV viral particles provide enhanced evasion of AAV humoral immunity, enhanced tropism, enhanced cell transduction, and/or enhanced transgene expression as compared to a reference AAV.

[0049] Also provided herein are methods of delivery of a biomolecule (e.g., a therapeutic biomolecule). In some embodiments, the method is in vivo, in vitro, or ex vivo delivery. In some embodiments, the method delivers the biomolecule (e.g., a therapeutic biomolecule) to one or more cells, particularly enhanced delivery/tropism to a muscle, heart, liver, plasma, kidney, brain, and/or cancer cell, while detargeting other cells.

[0050] The present disclosure also provides methods of treatment including administering to a subject in need any of the novel AAV capsid sequences/functional fragments, rAAV vector genome constructs, rAAV particles, host cells, or pharmaceutical compositions provided herein. The methods of treatment can be used for a disease or disorder capable of being treated by delivery to muscle, heart, liver, plasma, kidney, brain, or/and cancer cell.

[0051] Further provided herein, are methods of manufacturing a novel rAAV viral particle of the disclosure and producing a biomolecule (e.g., a therapeutic biomolecule) using a novel rAAV viral particle.

### 6.2 Definitions

[0052] Unless specifically stated or apparent from context, as used herein, the terms “a”, “an”, and “the” are understood to be singular or plural.

[0053] The terms “include(s)” or “such as,” and the like are intended to convey inclusion without limitation, unless otherwise specifically indicated

[0054] The terms “or” and “and” can be used interchangeably and can be understood to mean “and/or.”

[0055] The term “about” is understood as within a range of normal tolerance in the art, for example within 2 standard deviations of the mean. About can be understood as within 10%, 9%, 8%, 7%, 6%, 5%, 4%, 3%, 2%, 1%, 0.5%, 0.1%, 0.05%, or 0.01% of the stated value. Unless otherwise clear from context, all numerical values provided herein are modified by the term about.

[0056] As used herein, the terms “heterologous gene” or “heterologous regulatory sequence” means that the referenced gene or regulatory sequence is not naturally present in the AAV vector or particle and has been artificially introduced therein.

[0057] The term “heterologous transgene” or “transgene” refers to a nucleic acid that comprises both a heterologous gene and a heterologous regulatory sequence that are operably linked to the heterologous gene that control expression of that gene in a host cell. It is contemplated that the transgene herein can encode a biomolecule (e.g., a therapeutic biomolecule), such as a protein (e.g., an enzyme), polypeptide, peptide, RNA (e.g., tRNA, dsRNA, ribosomal RNA, catalytic RNAs, siRNA, miRNA, pre-miRNA, lncRNA, snoRNA, small hairpin RNA, trans-splicing RNA, and antisense RNA), one or more components of a gene or base editing system, e.g., a CRISPR gene editing system, antisense oligonucleotides (AONs), antisense oligonucleotide (AON)-mediated exon skipping, a poison exon(s) that triggers nonsense mediated decay (NMD), or a dominant negative mutant.

[0058] The term “vector” is understood to refer to any genetic element, such as a plasmid, phage, transposon, cosmid, bacmid, mini-plasmid (e.g., plasmid devoid of bacterial elements), Doggybone DNA (e.g., minimal, closed-linear constructs), chromosome, virus, virion (e.g., baculovirus), etc., which is capable of replication when associated with the proper control elements and which can transfer gene sequences between cells.

[0059] An “AAV vector genome” or “rAAV vector genome” refers to nucleic acids, either single-stranded or double-stranded, comprising an AAV inverted terminal repeat (ITR) (e.g., an AAV 5′ inverted terminal repeat (ITR) sequence and an AAV 3′ ITR) flanking a biomolecule (e.g., a therapeutic biomolecule) or transgene operably linked to a transcription regulatory element(s) that is heterologous to the AAV viral genome, e.g., one or more promoters and/or enhancers and, optionally, a polyadenylation sequence and/or one or more introns inserted between exons of the protein-coding sequence. A single-stranded AAV vector genome refers to nucleic acids that are present in the genome of an AAV virus particle, and can be either the sense strand or the anti-sense strand of the nucleic acid sequences disclosed herein. The size of such single-stranded nucleic acids is provided in bases. A double-stranded AAV vector genome can be provided by a double-stranded vector or virus, e.g., baculovirus, used to express or transfer the AAV vector genome nucleic acids. The size of such double-stranded nucleic acids in provided in base pairs (bp). In a specific embodiment, the AAV vector genome is a recombinant AAV vector genome.

[0060] The “AAV rep gene” or “rep” as used herein refers to the art-recognized region of the AAV genome which encodes the replication proteins of the virus which are required to replicate the viral genome and to insert the viral genome into a host genome during latent infection. For a further description of the AAV rep coding region, see, e.g., Muzyczka et al., Current Topics in Microbiol. and Immunol. 158:97-129 (1992); Kotin et al., Human Gene Therapy 5:793-801 (1994), the disclosures of which are incorporated herein by reference in their entireties. The rep coding region, as used herein, can be derived from any viral serotype, such as the AAV serotypes described herein. The region need not include all of the wild-type genes of an AAV serotype but may be altered, e.g., by the insertion, deletion and/or substitution of nucleotides, so long as the rep genes retain the desired functional characteristics when expressed in a suitable recipient cell (e.g., the ability to provide viral genome replication and packaging during infection).

[0061] The “AAV cap gene” or “cap” as used herein refers to the art-recognized region of the AAV genome which encodes the coat proteins of the virus which are required for packaging the viral genome. For a further description of the cap coding region, see, e.g., Muzyczka et al., Current Topics in Microbiol. and Immunol. 158:97-129 (1992); Kotin et al., Human Gene Therapy 5:793-801 (1994), the disclosures of which are incorporated herein by reference in their entireties. The AAV cap coding region, as used herein, can be derived from any AAV serotype, as described herein. The region need not include all of the wild-type cap genes of an AAV serotype but may be altered, e.g., by the insertion, deletion or substitution of nucleotides, so long as the genes provide for sufficient packaging functions when present in a host cell along with an AAV vector.

[0062] An “AAV virion” or “AAV viral particle” or “AAV particle” or “AAV vector particle” or “AAV virus” refers to a viral particle composed of at least one AAV capsid protein (e.g., VP1, VP2, or VP3, or a combination thereof). In a specific embodiment, an “AAV virion” or “AAV viral particle” or “AAV vector particle” or “AAV virus” refers to a virus composed of at least one AAV capsid protein and an encapsidated polynucleotide AAV vector genome. If the particle comprises a heterologous nucleotide sequence (e.g., an AAV vector genome) (i.e., a polynucleotide other than a wild-type AAV genome such as a transgene to be delivered to a mammalian cell), it is typically referred to as an “AAV vector particle”. Thus, production of AAV vector particle necessarily includes production of AAV vector genome, as such a vector genome is contained within an AAV vector particle. In a specific embodiment, the AAV viral particle is a recombinant AAV viral particle.

[0063] A “variable region” or “VR” or “VRs” refer to amino acids region(s) that vary within a capsid viral protein (“VP”, VP1, VP2, or VP3) and that are not a part of the conserved core structure. Generally, the variable regions contain surface loops conformations within the capsid viral proteins. The VR exhibit the highest sequence and structural variation within the AAV capsid sequences and may also have roles in receptor attachment, transcriptional activation of transgenes, tissue transduction and antigenicity. Table 8 provides examples of variable regions VRI-VRIX, GBS region, and GH loop. In certain embodiments, the location of the N-terminal and/or C-terminal ends of those regions may vary by from up to 1 amino acid, 2 amino acids, 3 amino acids, 4 amino acids or 5 amino acids from the amino acid locations of those regions as they are explicitly described herein (particularly in Table 8).

[0064] The “glycan binding sequence (GBS)” or “GBS domain” or “GBS region” refer to the amino acid sequence located between VR IV and VR V that governs the glycan binding specificity of the viral capsid. The locations of the GBS regions in various AAV VP1 amino acid sequences are herein described, and those from other AAV VP1 amino acid sequences are known in the art and/or may be routinely identified. Table 8 provides examples of GBS regions. In certain embodiments, the location of the N-terminal and/or C-terminal ends of the GBS region may vary by from up to 1 amino acid, 2 amino acids, 3 amino acids, 4 amino acids, or 5 amino acids from the amino acid locations of the GBS region explicitly described herein (particularly in Table 8).

[0065] The term “GH loop” refers to a loop sequence that is flanked by β-strand G and β-strand H within the internal β-barrel of the capsid protein. The “GH loop” sequence comprises variable region VR IV through VR VIII, including the encompassed GBS sequence and all interspersed conserved backbone sequence from the donor. The locations of the GH loop regions in various AAV VP1 amino acid sequences are herein described and those from other AAV VP1 amino acid sequences may be routinely identified. Table 8 provides examples of GH loops. In certain embodiments, the location of the N-terminal and/or C-terminal ends of the GH loop may vary by from up to 1 amino acid, 2 amino acids, 3 amino acids, 4 amino acids, or 5 amino acids from the amino acid locations of the GH loop explicitly described herein (particularly in Table 8).

[0066] Techniques known to one of skill in the art can be used to determine the percent identity between two amino acid sequences or between two nucleotide sequences. Generally, to determine the percent identity of two amino acid sequences or of two nucleic acid sequences, the sequences are aligned for optimal comparison purposes (e.g., gaps can be introduced in the sequence of a first amino acid or nucleic acid sequence for optimal alignment with a second amino acid or nucleic acid sequence). The amino acid residues or nucleotides at corresponding amino acid positions or nucleotide positions are then compared. When a position in the first sequence is occupied by the same amino acid residue or nucleotide as the corresponding position in the second sequence, then the molecules are identical at that position. The percent identity between the two sequences is a function of the number of identical positions shared by the sequences (i.e., % identity=number of identical overlapping positions/total number of positions X 100%). In one embodiment, the two sequences are the same length. In a certain embodiment, the percent identity is determined over the entire length of an amino acid sequence or nucleotide sequence. In some embodiments, the length of sequence identity comparison may be over the full-length of the two sequences being compared, the full-length of a gene coding sequence, or a fragment of at least about 500 to 5000 nucleotides, is desired. However, identity among smaller fragments, e.g., of at least about nine nucleotides, usually at least about 20 to 24 nucleotides, at least about 28 to 32 nucleotides, at least about 36 or more nucleotides, may also be desired. Similarly, “percent sequence identity” may be readily determined for amino acid sequences, over the full-length of a protein, or a fragment thereof. In specific embodiments, a fragment is at least about 8 amino acids in length, and may be up to about 700 amino acids. Examples of suitable functional fragments are described herein (e.g., in Section 6.3.1.3, infra).

[0067] The determination of percent identity between two sequences (e.g., amino acid sequences or nucleic acid sequences) can be accomplished using a mathematical algorithm. A preferred, non-limiting example of a mathematical algorithm utilized for the comparison of two sequences is the algorithm of Karlin and Altschul, 1990, Proc. Natl. Acad. Sci. U.S.A. 87:2264 2268, modified as in Karlin and Altschul, 1993, Proc. Natl. Acad. Sci. U.S.A. 90:5873 5877. Such an algorithm is incorporated into the NBLAST and XBLAST programs of Altschul et al., 1990, J. Mol. Biol. 215:403. BLAST nucleotide searches can be performed with the NBLAST nucleotide program parameters set, e.g., for score=100, wordlength=12 to obtain nucleotide sequences homologous to nucleic acid molecules described herein. BLAST protein searches can be performed with the XBLAST program parameters set, e.g., to score 50, wordlength=3 to obtain amino acid sequences homologous to a protein molecule described herein. To obtain gapped alignments for comparison purposes, Gapped BLAST can be utilized as described in Altschul et al., 1997, Nucleic Acids Res. 25:3389 3402. Alternatively, PSI BLAST can be used to perform an iterated search which detects distant relationships between molecules (Id.). When utilizing BLAST, Gapped BLAST, and PSI Blast programs, the default parameters of the respective programs (e.g., of XBLAST and NBLAST) can be used (see, e.g., National Center for Biotechnology Information (NCBI) on the worldwide web, ncbi.nlm.nih.gov). Another preferred, non-limiting example of a mathematical algorithm utilized for the comparison of sequences is the algorithm of Myers and Miller, 1988, CABIOS 4:11 17. Such an algorithm is incorporated in the ALIGN program (version 2.0) which is part of the GCG sequence alignment software package. When utilizing the ALIGN program for comparing amino acid sequences, a PAM120 weight residue table, a gap length penalty of 12, and a gap penalty of 4 can be used.

[0068] The percent identity between two sequences can be determined using techniques similar to those described above, with or without allowing gaps. In calculating percent identity, typically only exact matches are counted.

[0069] In a specific embodiment, the percent identity between at least two sequences (e.g., amino acid sequences or nucleic acid sequences) is accomplished using ClustalW. In certain specific embodiments, ClustalW with cost matrix BLOSUM, a gap open cost of 10, and a gap extend cost of 0.1 is used to determine the percent identity between at least two sequences (e.g., amino acid sequences or nucleic acid sequences).

[0070] The term “substantial identity” when referring to amino acids or fragments thereof, indicates that, when optimally aligned with appropriate amino acid insertions or deletions with another amino acid (or its complementary strand), there is amino acid sequence identity in at least about 90 to 99% of the aligned sequences using a technique described herein (e.g., ClustalW). Preferably, the identity is over the full-length of the two sequences being compared or a fragment thereof which is at least 8 amino acids, or more desirably, at least 15 amino acids in length. Examples of suitable fragments are described herein.

[0071] A “fragment” of a protein, polypeptide or peptide refers to a sequence of at least 8 amino acids in length. In specific embodiments, a fragment of a protein, polypeptide or peptide is at least about 15 amino acids in length, at least about 18 amino acids in length, at least about 20 amino acids in length, at least about 25 amino acids in length, at least about 30 amino acids in length, at least about 35 amino acids in length, at least about 40 amino acids in length, at least about 18 amino acids in length, at least about 45 amino acids in length, at least about 50 amino acids in length, at least about 55 amino acids in length, or at least about 60 amino acids in length. In specific embodiments, a fragment of a protein, polypeptide or peptide is at least about 65 amino acids in length, at least about 70 amino acids in length, at least about 80 amino acids in length, at least about 85 amino acids in length, at least about 90 amino acids in length, at least about 95 amino acids in length, at least about 100 amino acids in length, at least about 105 amino acids in length, at least about 110 amino acids in length, at least about 115 amino acids in length, at least about 120 amino acids in length, or at least about 125 amino acids in length. In specific embodiments, a fragment of a protein, polypeptide or peptide is at least about 150 amino acids in length, at least about 200 amino acids in length, at least about 250 amino acids in length, at least about 300 amino acids in length, at least about 350 amino acids in length, at least about 400 amino acids in length, at least about 450 amino acids in length, at least about 500 amino acids in length, at least about 550 amino acids in length, or at least about 600 amino acids in length. In specific embodiments, a fragment of a protein, polypeptide or peptide is about 9 to about 25 amino acids in length, about 15 to about 25 amino acids in length, about 20 to about 50 amino acids in length, about 25 to about 50 amino acids in length, about 50 to about 75 amino acids in length, about 50 to about 100 amino acids in length, or about 75 to about 100 amino acids in length. In specific embodiments, a fragment of a protein, polypeptide, or peptide is about 100 to about 150 amino acids in length, about 100 to about 200 amino acids in length, about 150 to about 200 amino acids in length, about 150 to about 300 amino acids in length, about 200 to about 300 amino acids in length, about 250 to about 300 amino acids in length, or about 300 to about 400 amino acids in length. In specific embodiments, a fragment comprises a portion of consecutive amino acid residues of a protein, polypeptide, or peptide.

[0072] A “fragment” of a nucleic acid sequence refers to a sequence of at least 9 nucleotides in length. In specific embodiments, a fragment of a nucleic acid sequence is at least about 15 nucleotides in length, at least about 18 nucleotides in length, at least about 20 nucleotides in length, at least about 25 nucleotides in length, at least about 30 nucleotides in length, at least about 35 nucleotides in length, at least about 40 nucleotides in length, at least about 18 nucleotides in length, at least about 45 nucleotides in length, at least about 50 nucleotides in length, at least about 55 nucleotides in length, or at least about 60 nucleotides in length. In specific embodiments, a fragment of a nucleic acid sequence is at least about 65 nucleotides in length, at least about 70 nucleotides in length, at least about 80 nucleotides in length, at least about 85 nucleotides in length, at least about 90 nucleotides in length, at least about 95 nucleotides in length, at least about 100 nucleotides in length, at least about 105 nucleotides in length, at least about 110 nucleotides in length, at least about 115 nucleotides in length, at least about 120 nucleotides in length, or at least about 125 nucleotides in length. In specific embodiments, a fragment of a nucleic acid sequence is at least about 150 nucleotides in length, at least about 200 nucleotides in length, at least about 250 nucleotides in length, at least about 300 nucleotides in length, at least about 350 nucleotides in length, at least about 400 nucleotides in length, at least about 450 nucleotides in length, at least about 500 nucleotides in length, at least about 550 nucleotides in length, or at least about 600 nucleotides in length. In specific embodiments, a fragment of a nucleic acid sequence is about 9 to about 25 nucleotides in length, about 15 to about 25 nucleotides in length, about 20 to about 50 nucleotides in length, about 25 to about 50 nucleotides in length, about 50 to about 75 amino acids in length, about 50 to about 100 amino acids in length, or about 75 to about 100 amino acids in length. In specific embodiments, a fragment of a nucleic acid sequence is about 100 to about 150 amino acids in length, about 100 to about 200 amino acids in length, about 150 to about 200 amino acids in length, about 150 to about 300 amino acids in length, about 200 to about 300 amino acids in length, about 250 to about 300 amino acids in length, or about 300 to about 400 amino acids in length. In specific embodiments, a fragment comprises a portion of consecutive nucleotides of a nucleic acid sequence.

[0073] The term “functional version” in the context of endogenous nucleic acid or protein means it has a functionality of a reference nucleic acid sequence or protein in vitro, when expressed in cultured cells, or in vivo, when expressed in cells or body tissues. For example, a functional version of a protein may retain one, two, three or more functions of an endogenous protein. In a particular example, a functional version of an enzyme would retain its enzymatic activity, protein binding/signaling, transport, or structural properties in a cell or organ. In an alternatively example, a functional version can also be a codon-optimized gene, a mini-gene that removes segments of the gene such as introns or codons not required for the function of interest.

[0074] The term “AAV clade” or “clade” means a group of AAV isolates defined by one or more common structural features of their capsid viral protein (VP1, VP2, and/or VP3), such as those provided in Sections 6.3.2.1-6.3.2.4. An AAV clade may be further defined by one or more common functional features such as tropism or ability to evade AAV humoral immunity. Alternatively, example a clade can be described as in Gao et al. J Virol. (2004) June; 78 (12): 6381-6388 by neighbor-joining tree analysis with maximum parsimony and likelihood that show phylogenetic groups containing nonredundant but phylogenetically similar AAV members (e.g., isolates) from different tissue sources (e.g., two or more, three or more AAV members).

### 6.3 Compositions

### 6.3.1 Novel AAV Capsid Sequences

[0075] The disclosure provides novel AAV capsid sequences including nucleic acid sequences (DNA, cDNA, and RNA) and amino acid sequences encoded by the nucleic acid sequences as well as fragments thereof, individually referred to herein as “novel AAV capsid nucleic acid sequences” and “novel AAV capsid amino acid sequences”, respectively, and collectively referred herein as “novel AAV capsid sequences.” The disclosure also provides for modified AAV capsid sequences. See Section 6.3.1.4. Unless explicitly clear from the context, the phrase “novel AAV capsid sequences” encompasses modified novel AAV capsid sequences.

[0076] In specific embodiments, provided herein are novel AAV capsid sequences comprising a VP1 sequence, a VP2 sequence, or a VP3 sequence that is at least 90%, at least 91%, at least 92%, at least 93%, at least 94%, at least 95%, at least 96%, at least 97%, at least 98%, or at least 99% identical to a VP1 sequence, a VP2 sequence, or a VP3 sequence of a capsid provided herein (e.g., in Table 9) with the “BCD_” prefix. In specific embodiments, provided herein are novel AAV capsid sequences comprising a VP1 sequence, a VP2 sequence, or a VP3 sequence identical to a VP1 sequence, a VP2 sequence, or a VP3 sequence of a capsid provided herein (e.g., in Table 9) with the “BCD_” prefix. In specific embodiments, a novel AAV capsid sequence comprises a VP1 sequence, a VP2 sequence, and a VP3 sequence.

[0077] An AAV capsid comprises three capsid proteins, VP1, VP2, and VP3. Often, a novel AAV capsid nucleotide sequence of the disclosure comprises a nucleotide sequence that encodes or codes for three proteins, referred to as viral proteins: VP1, VP2, and VP3. VP2 and VP3, are smaller than VP1. VP2 and VP3 coding regions are derived from the VP1 coding region and comprise a subset of the VP1 coding region AAV capsids may also be described as comprising constant regions and variable regions. The novel AAV capsid amino acid sequences include VP1, VP2, and VP3, as well as constant regions and variable regions. The novel AAV capsid sequences provided in the figures and sequence listing are of VP1 and VP1 coding regions.

[0078] One of skill in the art can readily determine the location of the VP2 and VP3 regions, variable regions, and constant regions by using, for example, the provided VP1 sequences of the novel AAV capsid proteins and comparing them to the VP1 regions of closely related AAVs. For example, the location of the VP2 and VP3 regions of a novel AAV capsid sequence may be determined by comparing the VP1 region(s) of the novel AAV capsid sequence to the VP2 and VP3 regions of an AAV with a VP1 region closely related to the VP1 of the novel AAV capsid sequence (e.g., known VP2 and VP3 regions). See, Example 9 and FIGS. 4-13.

### 6.3.1.1 Novel AAV Capsid Amino Acid Sequences

[0079] The novel AAV capsid VP1 amino acid sequences presented herein are described in Table 9 identified with a “BCD_” prefix and SEQ ID NOs: 12-127 and 361-362. See Example 1, infra, for a discussion of the identification of the novel AAV capsid VP1 sequences. As disclosed herein, one can determine the location of the novel VP2 and VP3 proteins of the disclosure, when present, by comparing the VP2 and VP3 regions with an AAV that is closely related to the novel capsid VP1 region.

[0080] In some embodiments, provided herein are amino acid sequences of a VP1 region of a capsid protein described in the Examples, infra. In one embodiment, provided herein is the VP1 amino acid sequence of BCD_0126. In another embodiment, provided herein is the VP1 amino acid sequence of BCD_0282. In another embodiment, provided herein is the VP1 amino acid sequence of BCD_0176. In another embodiment, provided herein is the VP1 amino acid sequence of BCD_0446. In another embodiment, provided herein is the VP1 amino acid sequence of BCD_0160. In another embodiment, provided herein is the VP1 amino acid sequence of BCD_0195. In another embodiment, provided herein is the VP1 amino acid sequence of BCD_0180. In another embodiment, provided herein is the VP1 amino acid sequence of BCD_0192. In another embodiment, provided herein is the VP1 amino acid sequence of BCD_0185. In another embodiment, provided is the VP1 amino acid sequence of BCD_0454. In another embodiment, provided herein is the VP1 amino acid sequence of BCD_0277. In another embodiment, provided herein is the VP1 amino acid sequence of BCD_0174. In another embodiment, provided herein is the VP1 amino acid sequence of BCD_0167. In another embodiment, provided herein is the VP1 amino acid sequence of BCD_0126. In another embodiment, provided herein is the VP1 amino acid sequence of BCD_0125. In another embodiment, provided herein is the VP1 amino acid sequence of BCD_0193. In another embodiment, provided herein is the VP1 amino acid sequence of BCD_0286. In another embodiment, provided herein is the VP1 amino acid sequence of BCD_0182. In another embodiment, provided herein is the VP1 amino acid sequence of BCD_0283. In another embodiment, provided herein is the VP1 amino acid sequence of BCD_0106. In another embodiment, provided herein is the VP1 amino acid sequence of BCD_0361.

[0081] The disclosure also provides for functional fragments of the novel AAV capsid amino acid sequences. Examples of functional fragments of the novel AAV capsid amino acid sequences of the disclosure include, for example, the constant region and the variable region sequences (i.e., VR, GBS, and/or GH Loop) of the VP1, VP2, and/or VP3 proteins as provided in the Examples (e.g., Example 9).

[0082] The amino acid sequences, proteins, peptides, and fragments of the disclosure can be produced by any suitable means, including recombinant production, chemical synthesis production, synthetic production, or any other means known in the art.

### 6.3.1.2 Novel AAV Capsid Nucleic Acid Sequences

[0083] The novel AAV VP1 nucleic acid sequences presented herein are described in Table 9 identified with a “BCD_” prefix an SEQ ID NOs: 192-307 and 363-364. See Example 1, infra, for a discussion of the identification of the novel AAV capsid VP1 sequences. The AAV capsid nucleic acid sequences of the disclosure encompass the strand which is the complementary nucleic acid sequence, as well as the RNA and cDNA sequences corresponding to sequences, and its complementary strand. Due the degeneracy of codons, multiple codons may encode for the same amino acid. Accordingly, provided herein are nucleic acid sequences encoding each of the novel AAV VP1 amino acid sequences in SEQ ID NOs: 12-127 and 361-362. In certain embodiments, a nucleic acid sequence encoding a novel AAV VP1 amino acid sequence presented herein is codon optimized for the intended host cell, e.g., codon optimized for human cells.

[0084] In some embodiments, provided herein are nucleic acid sequences encoding a VP1 region of a capsid protein described in the Examples, infra. In one embodiment, provided herein are nucleic acid sequences encoding the VP1 amino acid sequence of BCD_0126. In another embodiment, provided herein are nucleic acid sequences encoding the VP1 amino acid sequence of BCD_0282. In another embodiment, provided herein are nucleic acid sequences encoding the VP1 amino acid sequence of BCD_0176. In another embodiment, provided herein are nucleic acid sequences encoding the VP1 amino acid sequence of BCD_0446. In another embodiment, provided herein are nucleic acid sequences encoding the VP1 amino acid sequence of BCD_0160. In another embodiment, provided herein are nucleic acid sequences encoding the VP1 amino acid sequence of BCD_0195. In another embodiment, provided herein are nucleic acid sequences encoding the VP1 amino acid sequence of BCD_0180. In another embodiment, provided herein are nucleic acid sequences encoding the VP1 amino acid sequence of BCD_0192. In another embodiment, provided herein are nucleic acid sequences encoding the VP1 amino acid sequence of BCD_0185. In another embodiment, provided herein are nucleic acid sequences encoding the VP1 amino acid sequence of BCD_0454. In another embodiment, provided herein are nucleic acid sequences encoding the VP1 amino acid sequence of BCD_0277. In another embodiment, provided herein are nucleic acid sequences encoding the VP1 amino acid sequence of BCD_0174. In another embodiment, provided herein are nucleic acid sequences encoding the VP1 amino acid sequence of BCD_0167. In another embodiment, provided herein are nucleic acid sequences encoding the VP1 amino acid sequence of BCD_0126. In another embodiment, provided herein are nucleic acid sequences encoding the VP1 amino acid sequence of BCD_0125. In another embodiment, provided herein are nucleic acid sequences encoding the VP1 amino acid sequence of BCD_0193. In another embodiment, provided herein are nucleic acid sequences encoding the VP1 amino acid sequence of BCD_0286. In another embodiment, provided herein are nucleic acid sequences encoding the VP1 amino acid sequence of BCD_0182. In another embodiment, provided herein are nucleic acid sequences encoding the VP1 amino acid sequence of BCD_0283. In another embodiment, provided herein are nucleic acid sequences encoding the VP1 amino acid sequence of BCD_0106. In another embodiment, provided herein are nucleic acid sequences encoding the VP1 amino acid sequence of BCD_0361.

[0085] As disclosed herein, one can readily determine the location of the VP2 and VP3 nucleic acid sequences encoding the proteins, if present, by comparing the VP2 and VP3 regions with an AAV that has substantial identity or similarity to the novel capsid VP1 region. Comparison can be conducted as provided herein. Accordingly, provided herein are nucleic acid sequences encoding the VP2 region of the novel AAV VP1 amino acids sequences in SEQ ID NOs: 12-127 and 361-362. Also provided herein are nucleic acid sequences encoding the VP3 region of the novel AAV VP1 amino acid sequences in SEQ ID NOs: 12-127 and 361-362.

[0086] In some embodiments, provided herein are nucleic acid sequences encoding a VP2 region of a capsid protein described in the Examples, infra. In one embodiment, provided herein are nucleic acid sequences encoding the VP2 region of the VP1 amino acid sequence of BCD_0126. In another embodiment, provided herein are nucleic acid sequences encoding the VP2 region of the VP1 amino acid sequence of BCD_0282. In another embodiment, provided herein are nucleic acid sequences encoding the VP2 region of the VP1 amino acid sequence of BCD_0176. In another embodiment, provided herein are nucleic acid sequences encoding the VP2 region of the VP1 amino acid sequence of BCD_0446. In another embodiment, provided herein are nucleic acid sequences encoding the VP2 region of the VP1 amino acid sequence of BCD_0160. In another embodiment, provided herein are nucleic acid sequences encoding the VP2 region of the VP1 amino acid sequence of BCD_0195. In another embodiment, provided herein are nucleic acid sequences encoding the VP2 region of the VP1 amino acid sequence of BCD_0180. In another embodiment, provided herein are nucleic acid sequences encoding the VP2 region of the VP1 amino acid sequence of BCD_0192. In another embodiment, provided herein are nucleic acid sequences encoding the VP2 region of the VP1 amino acid sequence of BCD_0185. In another embodiment, provided herein are nucleic acid sequences encoding the VP2 region of the VP1 amino acid sequence of BCD_0454. In another embodiment, provided herein are nucleic acid sequences encoding the VP2 region of the VP1 amino acid sequence of BCD_0277. In another embodiment, provided herein are nucleic acid sequences encoding the VP2 region of the VP1 amino acid sequence of BCD_0174. In another embodiment, provided herein are nucleic acid sequences encoding the VP2 region of the VP1 amino acid sequence of BCD_0167. In another embodiment, provided herein are nucleic acid sequences encoding the VP2 region of the VP1 amino acid sequence of BCD_0126. In another embodiment, provided herein are nucleic acid sequences encoding the VP2 region of the VP1 amino acid sequence of BCD_0125. In another embodiment, provided herein are nucleic acid sequences encoding the VP2 region of the VP1 amino acid sequence of BCD_0193. In another embodiment, provided herein are nucleic acid sequences encoding the VP2 region of the VP1 amino acid sequence of BCD_0286. In another embodiment, provided herein are nucleic acid sequences encoding the VP2 region of the VP1 amino acid sequence of BCD_0182. In another embodiment, provided herein are nucleic acid sequences encoding the VP2 region of the VP1 amino acid sequence of BCD_0283. In another embodiment, provided herein are nucleic acid sequences encoding the VP2 region of the VP1 amino acid sequence of BCD_0106. In another embodiment, provided herein are nucleic acid sequences encoding the VP2 region of the VP1 amino acid sequence of BCD_0361.

[0087] In some embodiments, provided herein are nucleic acid sequences encoding a VP3 region of a capsid protein described in the Examples, infra. In one embodiment, provided herein are nucleic acid sequences encoding the VP3 region of the VP1 amino acid sequence of BCD_0126. In another embodiment, provided herein are nucleic acid sequences encoding the VP3 region of the VP1 amino acid sequence of BCD_0282. In another embodiment, provided herein are nucleic acid sequences encoding the VP3 region of the VP1 amino acid sequence of BCD_0176. In another embodiment, provided herein are nucleic acid sequences encoding the VP3 region of the VP1 amino acid sequence of BCD_0446. In another embodiment, provided herein are nucleic acid sequences encoding the VP3 region of the VP1 amino acid sequence of BCD_0160. In another embodiment, provided herein are nucleic acid sequences encoding the VP3 region of the VP1 amino acid sequence of BCD_0195. In another embodiment, provided herein are nucleic acid sequences encoding the VP3 region of the VP1 amino acid sequence of BCD_0180. In another embodiment, provided herein are nucleic acid sequences encoding the VP3 region of the VP1 amino acid sequence of BCD_0192. In another embodiment, provided herein are nucleic acid sequences encoding the VP3 region of the VP1 amino acid sequence of BCD_0185. In another embodiment, provided herein are nucleic acid sequences encoding the VP3 region of the VP1 amino acid sequence of BCD_0454. In another embodiment, provided herein are nucleic acid sequences encoding the VP3 region of the VP1 amino acid sequence of BCD_0277. In another embodiment, provided herein are nucleic acid sequences encoding the VP3 region of the VP1 amino acid sequence of BCD_0174. In another embodiment, provided herein are nucleic acid sequences encoding the VP3 region of the VP1 amino acid sequence of BCD_0167. In another embodiment, provided herein are nucleic acid sequences encoding the VP3 region of the VP1 amino acid sequence of BCD_0126. In another embodiment, provided herein are nucleic acid sequences encoding the VP3 region of the VP1 amino acid sequence of BCD_0125. In another embodiment, provided herein are nucleic acid sequences encoding the VP3 region of the VP1 amino acid sequence of BCD_0193. In another embodiment, provided herein are nucleic acid sequences encoding the VP3 region of the VP1 amino acid sequence of BCD_0286. In another embodiment, provided herein are nucleic acid sequences encoding the VP3 region of the VP1 amino acid sequence of BCD_0182. In another embodiment, provided herein are nucleic acid sequences encoding the VP3 region of the VP1 amino acid sequence of BCD_0283. In another embodiment, provided herein are nucleic acid sequences encoding the VP3 region of the VP1 amino acid sequence of BCD_0106. In another embodiment, provided herein are nucleic acid sequences encoding the VP3 region of the VP1 amino acid sequence of BCD_0361.

[0088] Included within the scope of the AAV capsid nucleic acid sequences of the disclosure are nucleic acid sequences that hybridize under stringent conditions to the nucleotide sequences encoding the novel AAV capsids. In some embodiments, provided herein is a nucleic acid sequence(s) that hybridizes under stringent conditions across the entire length of a nucleotide sequence encoding a novel AAV capsid. In some embodiments, provided herein is a nucleic acid sequence that hybridizes under stringent conditions across the entire length of a nucleotide sequence encoding a VP1 capsid protein set forth in Table 9, which has a “BCD_” prefix. In a specific embodiment, provided herein is a nucleic acid sequence that hybridizes under stringent conditions across the entire length of any one of the nucleotide sequences set forth in SEQ ID NOs: 192-307 and 363-364. In some embodiments, provided herein is a nucleic acid sequence that hybridizes under stringent conditions across the entire length of a nucleotide sequence encoding a capsid protein described in the Examples. In specific embodiments, provided herein a nucleic acid sequence that hybridizes under stringent conditions across the entire length of the nucleotide sequence provided in Table 9, infra, which encodes a capsid protein of BCD_0126, BCD_0282, BCD_0176, BCD_0446, BCD_0160, BCD_0195, BCD_0180, BCD_0192, BCD_0185, BCD_0454, BCD_0277, BCD_0174, BCD_0167, BCD_0126, BCD_0125, BCD_0193, BCD_0286, BCD_0182, BCD_0283, BCD_0106, or BCD_0361. In other embodiments, provided herein is a nucleic acid sequence(s) that hybridizes under stringent conditions across a fragment of a nucleotide sequence encoding a novel AAV capsid. In some embodiments, provided herein is a nucleic acid sequence that hybridizes under stringent conditions across a fragment of a nucleotide sequence encoding a VP1 capsid protein set forth in Table 9, which has a “BCD_” prefix. In a specific embodiment, provided herein is a nucleic acid sequence that hybridizes under stringent conditions across a fragment of any one of the nucleotide sequences set forth in SEQ ID NOs: 192-307 and 363-364. In some embodiments, provided herein is a nucleic acid sequence that hybridizes under stringent conditions across a fragment of a nucleotide sequence encoding a capsid protein described in the Examples. In specific embodiments, provided herein a nucleic acid sequence that hybridizes under stringent conditions across a fragment of the nucleotide sequence provided in Table 9, infra, which encodes the VP1 amino acid sequence of BCD_0126, BCD_0282, BCD_0176, BCD_0446, BCD_0160, BCD_0195, BCD_0180, BCD_0192, BCD_0185, BCD_0454, BCD_0277, BCD_0174, BCD_0167, BCD_0126, BCD_0125, BCD_0193, BCD_0286, BCD_0182, BCD_0283, BCD_0106, or BCD_0361. Fragments of, e.g., 15, 16, 17, 18, 19 or 20 nucleotides or more that are selective for (i.e., specifically hybridize to any one of the polynucleotides of the invention) are contemplated. In certain embodiments, fragments are at least 9 nucleotides, at least 12 nucleotides, at least 15 nucleotides, at least 20 nucleotides, at least 25 nucleotides, at least 50 nucleotides, at least 75 nucleotides or at least 100 nucleotides in length. In some embodiments, fragments are 15 to 30 nucleotides, 25 to 50 nucleotides, 25 to 75 nucleotides, 50 to 75 nucleotides, 50 to 100 nucleotides, or 75 to 100 nucleotides in length. In certain embodiments, fragments are 100 to 125 nucleotides, 100 to 150 nucleotides, 125 to 150 nucleotides, 150 to 175 nucleotides, 150 to 200 nucleotides, or 175 to 200 nucleotides in length. In some embodiments, the fragment comprises a nucleotide sequence encoding a variable region(s) of an AAV capsid.

[0089] Included within the scope of the AAV capsid nucleic acid sequences of the disclosure are nucleic acid sequence fragments that hybridize under stringent conditions to the nucleotide sequences encoding the novel AAV capsid, which fragment is greater than about 9 nucleotides, is greater than about 12 nucleotides, greater than about 15 nucleotides, greater than about 27 nucleotides, greater than about 39 nucleotides, greater than about 51, or greater than about 462 nucleotides. Fragments of, e.g., 9, 12, 15, 27, 39, 51, or 462 nucleotides or more that are selective for (i.e., specifically hybridize to any one of the polynucleotides of the disclosure) are contemplated. Probes capable of hybridizing to a polynucleotide under stringent conditions can differentiate polynucleotide sequences of the disclosure from other polynucleotide sequences.

[0090] The term “stringent” in the context of hybridization is used to refer to conditions that are commonly understood in the art as stringent. Hybridization stringency is principally determined by temperature, ionic strength, and the concentration of denaturing agents such as formamide. Examples of stringent conditions for hybridization and washing are 0.015 M sodium chloride, 0.0015M sodium citrate at 65-68° C. or 0.015 M sodium chloride, 0.0015M sodium citrate, and 50% formamide at 42° C. See Green, M. and Sambrook, J., Molecular Cloning: A Laboratory Manual, 4th Ed., Cold Spring Harbor Laboratory (Cold Spring Harbor, N.Y. 2012).

[0091] Where more stringent conditions (such as higher temperature, lower ionic strength, higher formamide, or other denaturing agent) are used, the rate of hybridization will be affected. In instances wherein hybridization of deoxyoligonucleotides is concerned, additional exemplary stringent hybridization conditions include washing in 6×SSC 0.05% sodium pyrophosphate at 37° C. (for 14-base oligos), 48° C. (for 17-base oligos), 55° C. (for 20- base oligos), and 60° C. (for 23-base oligos).

[0092] Other agents may be included in the hybridization and washing buffers for the purpose of reducing non-specific and/or background hybridization. Examples of other agents are 0.1% bovine serum albumin, 0.1% polyvinyl-pyrrolidone, 0.1% sodium pyrophosphate, 0.1% sodium dodecylsulfate, NaDodS04 (SDS), ficoll, Denhardt's solution, sonicated salmon sperm DNA (or other non-complementary DNA), and dextran sulfate, although other suitable agents can also be used. The concentration and types of these additives can be changed without substantially affecting the stringency of the hybridization conditions. Hybridization experiments are usually carried out at pH 6.8-7.4, however, at typical ionic strength conditions, the rate of hybridization is nearly independent of pH. See Anderson et al., Nucleic Acid Hybridisation: A Practical Approach, Ch. 4, IRL Press Limited (Oxford, England). Hybridization conditions can be adjusted by one skilled in the art to accommodate these variables and allow DNAs of different sequence relatedness to form hybrids.

[0093] The AAV capsid nucleic acid sequences may be produced by any suitable means, including recombinant production, chemical synthesis production, synthetic production, or any other means known in the art.

### 6.3.1.3 Functional Fragments of Novel AAV Capsid Protein

[0094] The disclosure also provides functional fragments of the novel AAV VP1 capsid sequences disclosed herein.

[0095] The functional fragments of the novel AAV capsid VP1 sequences include the VP2, VP3, constant region(s), variable region(s), GBS domain, GH loop, or a combination thereof. In some embodiments the functional fragments provided by the disclosure have one or more conservative amino acid substitutions. See for example, Table 1. Some non-limiting examples of conservative amino acid substitutions in fragments of AAV capsid VP1 sequences are provided in Table 2 and FIGS. 4-13. References to Table 2 refers to subtables 2.6 to 2.15.

[0096] The variable region functional fragments of the novel VP1 amino acid sequences can be determined using the information provided herein. See, Example 9. Such functional fragments of the capsid VP1 protein may be used alone, in combination with other AAV sequences or fragments, e.g., AAV sequences or fragments from other novel AAV capsid sequences described herein, or in combination with elements from other AAVs (e.g., a reference AAV) or other viral sequences (e.g., non-AAV sequences such as a delivery vehicle).

[0097] The inclusion of one or more functional fragments of the disclosure in an AAV capsid may result in an AAV viral particle or delivery vehicle (e.g., nanoparticle, such as a lipid nanoparticle) with one, two, three or more, or more, or all of the of following: enhanced packaging yield, enhanced transduction efficiency, enhanced gene transfer efficiency, enhanced translation efficiency, enhanced tissue-specificity (i.e., tropism), and/or the enhanced ability to evade immunity compared to a non-modified AAV viral particle or naturally occurring sequence (e.g., a reference sequence, such as in Table 4, infra). The enhanced activities of the AAV particle or nanoparticle may be assessed in an in vitro or an in vivo assay. The in vitro or in vivo assay may be one described herein (e.g., in the Examples) or others known in the art to assess the yield, transduction efficiency, gene transfer efficiency, translation efficiency, tissue-specificity (i.e., tropism), and/or the ability to evade immunity of an AAV viral particle or delivery vehicle.

### 6.3.1.4 Modified Novel AAV Capsid

[0098] The disclosure also provides modifications of the novel AAV capsid sequences. In a specific embodiment, a modified novel AAV capsid sequence (i.e., VP1, VP2, or VP3) of the disclosure comprises a novel AAV capsid sequence (e.g., any one of SEQ ID NOs: 12-127 and 361-362, or SEQ ID NOs: 192-307 and 363-364) with at least one nucleic acid or amino acid residue mutation (change, e.g., substitution, insertion, and/or deletion, relative to the novel AAV capsid sequence) with no more than about 10% of the total sequence the novel AAV capsid sequence (e.g., one of SEQ ID NOs: 12-127 and 361-362, or SEQ ID NOs: 192-307 and 363-364) changed. In some embodiments, about 1% to about 4% of the total sequence of the novel AAV capsid sequence is changed. In some embodiments, about 4%-6% of the total sequence of the novel AAV capsid sequence is changed. In some other embodiments, about 6% to about 8% of the total sequence of the novel AAV capsid sequence is changed. Yet, in some other embodiments, about 8% to about 10% of the total sequence of the novel AAV capsid sequence is changed. Non-limiting substitution, insertion, and/or deletions modifications that can be made to a novel AAV capsid sequence are provided in Table 2 and FIGS. 4-13. Regarding FIGS. 4-13 the colon mark (:) indicates amino acid residue substitution with strongly similar properties, the period mark (.) indicates amino acid residue substitution with weakly similar properties, and the asterisk mark (*) indicates fully conserved amino acid residue substitution as determined by ClustalΩ (alternatively known as “Clustal O” or “Clustal Omega”).

[0099] In certain embodiments, a modified novel AAV capsid protein includes an AAV capsid protein of an AAV clade member listed in any one of Tables 2.6 to 2.15 with one or more of the amino acid residue variations (e.g., amino acid residue substitutions) listed in Tables 2.6 to 2.16, respectively. In specific embodiments, a modified novel AAV capsid protein comprises an amino acid sequence of an AAV capsid of any one of Nos. 0-50 in Table 2.6 with one or more mutations, such as one or more amino acid substitutions (e.g., 1, 2, 3, 4, 5, 6, 7, 8, 9 or more), recited in Table 2.6, provided that the mutation(s) (e.g., amino acid substitution(s)) does not result in a known AAV capsid (e.g., Nos. 38-50 in Table 2.6). In specific embodiments, a modified novel AAV capsid protein comprises an amino acid sequence of an AAV capsid of any one of Nos. 0-48 in Table 2.7 with one or more mutations, such as one or more amino acid substitutions (e.g., 1, 2, 3, 4, 5, 6, 7, 8, 9 or more), recited in Table 2.7, provided that the mutation(s) (e.g., amino acid substitution(s)) does not result in a known AAV capsid (e.g., Nos. 0, 1, and 23-48 in Table 2.7). In specific embodiments, a modified novel AAV capsid protein comprises an amino acid sequence of an AAV capsid of any one of Nos. 0-29 in Table 2.8 with one or more mutations, such as one or more amino acid substitutions (e.g., 1, 2, 3, 4, 5, 6, 7, 8, 9 or more), recited in Table 2.8, provided that the mutation(s) (e.g., amino acid substitution(s)) does not result in a known AAV capsid (e.g., No. 1 in Table 2.8). In specific embodiments, a modified novel AAV capsid protein comprises an amino acid sequence of an AAV capsid of any one of Nos. 0-19 in Table 2.9 with one or more mutations, such as one or more amino acid substitutions (e.g., 1, 2, 3, 4, 5, 6, 7, 8, 9 or more), recited in Table 2.9, provided that the mutation(s) (e.g., amino acid substitution(s)) does not result in a known AAV capsid (e.g., No. 0 and 11-19 in Table 2.9).

[0100] In specific embodiments, a modified novel AAV capsid protein comprises an amino acid sequence of an AAV capsid of any one of Nos. 0-7 in Table 2.10 with one or more mutations, such as one or more amino acid substitutions (e.g., 1, 2, 3, 4, 5, 6, 7, 8, 9 or more), recited in Table 2.10, provided that the mutation(s) (e.g., amino acid substitution(s)) does not result in a known AAV capsid (e.g., No. 0 and 2-7 in Table 2.10). In specific embodiments, a modified novel AAV capsid protein comprises an amino acid sequence of an AAV capsid of any one of Nos. 0-3 in Table 2.11 with one or more mutation(s), such as one or more amino acid substitutions (e.g., 1, 2, 3, 4, 5, 6, 7, 8, 9 or more), recited in Table 2.11, provided that the mutation(s) (e.g., amino acid substitution(s)) does not result in a known AAV capsid (e.g., No. 0 in Table 2.11). In specific embodiments, a modified novel AAV capsid protein comprises an amino acid sequence of an AAV capsid of any one of Nos. 0-6 in Table 2.12 with one or more mutations, such as one or more amino acid substitutions (e.g., 1, 2, 3, 4, 5, 6, 7, 8, 9 or more), recited in Table 2.12, provided that the mutation(s) (e.g., amino acid substitution(s)) does not result in a known AAV capsid. In specific embodiments, a modified novel AAV capsid protein comprises an amino acid sequence of an AAV capsid of any one of Nos. 0-3 in Table 2.13 with one or more mutations, such as one or more amino acid substitutions (e.g., 1, 2, 3, 4, 5, 6, 7, 8, 9 or more), recited in Table 2.13, provided that the mutation(s) (e.g., amino acid substitution(s)) does not result in a known AAV capsid (e.g., No. 0 or 1 in Table 2.13).

[0101] In specific embodiments, a modified novel AAV capsid protein comprises an amino acid sequence of an AAV capsid of any one of Nos. 0-6 in Table 2.14 with one or more mutations, such as one or more amino acid substitutions (e.g., 1, 2, 3, 4, 5, 6, 7, 8, 9 or more), recited in Table 2.14, provided that the mutation(s) (e.g., amino acid substitution(s)) does not result in a known AAV capsid (e.g., No. 0, 1, or 3 in Table 2.14). In specific embodiments, a modified novel AAV capsid protein comprises an amino acid sequence of an AAV capsid of any one of Nos. 0-1 in Table 2.15 with one or more mutation(s), such as one or more amino acid substitutions (e.g., 1, 2 or more), recited in Table 2.15, provided that the mutation(s) (e.g., amino acid substitution(s)) does not result in a known AAV capsid.

[0102] In another specific embodiment, a modified novel AAV capsid sequence of the disclosure comprises a novel AAV capsid sequence e.g., any one of SEQ ID NOs: 12-127 and 361-362, or SEQ ID NOs: 192-307 and 363-364) with at least one amino acid residue or nucleic acid substitution but with no more than about 10% of the total sequence of the novel AAV capsid sequence (e.g., any one of SEQ ID NOs: 12-127 and 361-362 or SEQ ID NOs: 192-307 and 363-364) changed. In some embodiments, about 1% to about 4% of the total sequence of the novel AAV capsid sequence is changed. In some embodiments, about 4% to about 6% of the total sequence of the novel AAV capsid sequence is changed. In some other embodiments, about 6% to about 8% of the total sequence of the novel AAV capsid sequence is changed. Yet, in some other embodiments, about 8% to about 10% of the total sequence of the novel AAV capsid sequence is changed. Some non-limiting amino acid modifications that can be made to a novel AAV capsid sequence are provided in Table 2 and FIGS. 4-13.

[0103] In another specific embodiment, a modified novel AAV capsid sequence of the disclosure comprises a novel AAV capsid amino acid sequence (e.g., any one of 12-127 and 361-362) with 1, 2, 3, 4, 5, 6, 7, 8, 9, or 10, or 1 to 10 amino acid residue substitutions in the novel AAV capsid amino acid sequence (e.g., any one of 12-127 and 361-362). In another specific embodiment, a modified novel AAV capsid sequence of the disclosure comprises a novel AAV capsid amino acid sequence (e.g., any one of SEQ ID NOs: 12-127 and 361-362) with 1, 2, 3, 4, 5, 6, 7, 8, 9, 10, 11, 12, 13, 14, 15, 16, 17, 18, 19, 20, 21, 22, 23, 24, 25, 26, 27, 28, 29, 30, 31, or 32 amino acid residue substitutions in the novel AAV capsid amino acid sequence (e.g., any one of SEQ ID NOs: 12-127 and 361-362).

[0104] In another specific embodiment, a modified novel AAV capsid amino acid sequence of the disclosure comprises a novel AAV capsid amino acid sequence (e.g., any one of SEQ ID NOs: 12-127 and 361-362) with 32, 33, 34, 35, 36, 37, 38, 39, 40, 41, 42, 43, 44, 45, 46, 47, 48, 49 or 50 amino acid residue substitutions in the novel AAV capsid amino acid sequence (e.g., one of SEQ ID NOs: 12-127 and 361-362).

[0105] In another specific embodiment, a modified novel AAV capsid amino acid sequence of the disclosure comprises a novel AAV capsid amino acid sequence (e.g., any one of SEQ ID NOs: 12-127 and 361-362) with 50, 51, 52, 53, 54, 55, 56, 57, 58, 59, 60, 61, 62, 63, 64, 65, 66, 67, 68, 69, 70, 71, 72, 73, 74, 75, 76, 77, 78, 79 or 80 amino acid residue substitutions in the novel AAV capsid amino acid sequence (e.g., any one of SEQ ID NOs: 12-127 and 361-362).

[0106] In another specific embodiment, a modified novel AAV capsid amino acid sequence of the disclosure comprises a novel AAV capsid amino acid sequence (e.g., any one of SEQ ID NOs: 12-127 and 361-362) with 1, 2, 3, 4, 5, 6, 7, 8, 9 or 10 conservative amino acid residue substitutions in the novel AAV capsid amino acid sequence (e.g., any one of SEQ ID NOs: 12-127 and 361-362).

[0107] In another specific embodiment, a modified novel AAV capsid amino acid sequence of the disclosure comprises a novel AAV capsid amino acid sequence (e.g., any one of SEQ ID NOs: 12-127 and 361-362) with 11, 12, 13, 14, 15, 16, 17, 18, 19 or 20 conservative amino acid residue substitutions in the novel AAV capsid amino acid sequence (e.g., any one of SEQ ID NOs: 12-127 and 361-362).

[0108] In another specific embodiment, a modified novel AAV capsid amino acid sequence of the disclosure comprises an AAV capsid amino acid sequence (e.g., a VP1, VP2 or VP3 amino acid sequence) of a representative sequence in Table 2 with 1, 2, 3, 4, 5, 6, 7, 8, 9, 10, 11, 12, 13, 14 or 15 amino acid substitutions (e.g., conservative amino acid substitutions), provided that the modified novel AAV capsid amino acid sequence is not a known AAV capsid protein. In another specific embodiment, a modified novel AAV capsid amino acid sequence of the disclosure comprises an AAV capsid amino acid sequence (e.g., a VP1, VP2 or VP3 amino acid sequence) of a representative sequence in Table 2 with 16, 17, 18, 19, 20, 21, 22, 23, 24, 25, 26, 27, 28, 29, or 30 amino acid substitutions (e.g., conservative amino acid substitutions), provided that the modified novel AAV capsid amino acid sequence is not a known AAV capsid protein. In another specific embodiment, a modified novel AAV capsid amino acid sequence of the disclosure comprises an AAV capsid amino acid sequence (e.g., a VP1, VP2 or VP3 amino acid sequence) of a representative sequence in Table 2 with 31, 32, 33, 34, 35, 36, 37, 38, 39, 40 or more amino acid substitutions (e.g., conservative amino acid substitutions), provided that the modified novel AAV capsid amino acid sequence is not a known AAV capsid protein. In specific embodiments, the amino acid substitution(s) is one provided in Table 2.

[0109] In another specific embodiment, a modified novel AAV capsid amino acid sequence of the disclosure comprises an AAV VP1, VP2 or VP3 amino acid sequence that has at least 90% identical to an AAV VP1, VP2 or VP3 amino acid sequence of representative sequence in Table 2, provided that the modified novel AAV capsid amino acid sequence is not a known AAV capsid protein. In another specific embodiment, a modified novel AAV capsid amino acid sequence of the disclosure comprises an AAV VP1, VP2 or VP3 amino acid sequence that has at least 91% identical to an AAV VP1, VP2 or VP3 amino acid sequence of representative sequence in Table 2, provided that the modified novel AAV capsid amino acid sequence is not a known AAV capsid protein. In another specific embodiment, a modified novel AAV capsid amino acid sequence of the disclosure comprises an AAV VP1, VP2 or VP3 amino acid sequence that has at least 92% identical to an AAV VP1, VP2 or VP3 amino acid sequence of representative sequence in Table 2, provided that the modified novel AAV capsid amino acid sequence is not a known AAV capsid protein. In another specific embodiment, a modified novel AAV capsid amino acid sequence of the disclosure comprises an AAV VP1, VP2 or VP3 amino acid sequence that has at least 93% identical to an AAV VP1, VP2 or VP3 amino acid sequence of representative sequence in Table 2, provided that the modified novel AAV capsid amino acid sequence is not a known AAV capsid protein. In another specific embodiment, a modified novel AAV capsid amino acid sequence of the disclosure comprises an AAV VP1, VP2 or VP3 amino acid sequence that has at least 94% identical to an AAV VP1, VP2 or VP3 amino acid sequence of representative sequence in Table 2, provided that the modified novel AAV capsid amino acid sequence is not a known AAV capsid protein. In another specific embodiment, a modified novel AAV capsid amino acid sequence of the disclosure comprises an AAV VP1, VP2 or VP3 amino acid sequence that has at least 95% identical to an AAV VP1, VP2 or VP3 amino acid sequence of representative sequence in Table 2, provided that the modified novel AAV capsid amino acid sequence is not a known AAV capsid protein. In another specific embodiment, a modified novel AAV capsid amino acid sequence of the disclosure comprises an AAV VP1, VP2 or VP3 amino acid sequence that has at least 95% identical to an AAV VP1, VP2 or VP3 amino acid sequence of representative sequence in Table 2, provided that the modified novel AAV capsid amino acid sequence is not a known AAV capsid protein. In another specific embodiment, a modified novel AAV capsid amino acid sequence of the disclosure comprises an AAV VP1, VP2 or VP3 amino acid sequence that has at least 96% identical to an AAV VP1, VP2 or VP3 amino acid sequence of representative sequence in Table 2, provided that the modified novel AAV capsid amino acid sequence is not a known AAV capsid protein. In another specific embodiment, a modified novel AAV capsid amino acid sequence of the disclosure comprises an AAV VP1, VP2 or VP3 amino acid sequence that has at least 97% identical to an AAV VP1, VP2 or VP3 amino acid sequence of representative sequence in Table 2, provided that the modified novel AAV capsid amino acid sequence is not a known AAV capsid protein. In another specific embodiment, a modified novel AAV capsid amino acid sequence of the disclosure comprises an AAV VP1, VP2 or VP3 amino acid sequence that has at least 98% identical to an AAV VP1, VP2 or VP3 amino acid sequence of representative sequence in Table 2, provided that the modified novel AAV capsid amino acid sequence is not a known AAV capsid protein. In another specific embodiment, a modified novel AAV capsid amino acid sequence of the disclosure comprises an AAV VP1, VP2 or VP3 amino acid sequence that has at least 99% identical to an AAV VP1, VP2 or VP3 amino acid sequence of representative sequence in Table 2, provided that the modified novel AAV capsid amino acid sequence is not a known AAV capsid protein.

[0110] In another specific embodiment, a modified novel AAV capsid sequence of the disclosure comprises a fragment of a novel AAV capsid sequence (e.g., any one of SEQ ID NOs: 12-127 and 361-362, or SEQ ID NOs: 192-307 and 363-364) with at least one amino acid residue or nucleic acid mutation (e.g., substitution, insertion, and/or deletion) but with no more than about 10% of the total sequence of the fragment of the novel AAV sequence (e.g., the fragment of any one of SEQ ID NOs: 12-127 and 361-362, or SEQ ID NOs: 192-307 and 363-364) changed.

[0111] In another specific embodiment, a modified novel AAV capsid sequence of the disclosure comprises a fragment of a novel AAV capsid sequence (e.g., any one of SEQ ID NOs: 12-127 and 361-362, or SEQ ID NOs: 192-307 and 363-364) with at least one amino acid residue or nucleic acid substitution but with no more than about 10% of the total sequence the fragment of the novel AAV capsid sequence (e.g., the fragment of any one of SEQ ID NOs: 12-127 and 361-362, or SEQ ID NOs: 192-307 and 363-364) changed.

[0112] In another specific embodiment, a modified novel AAV capsid sequence of the disclosure comprises a fragment of a novel AAV capsid amino acid sequence (e.g., any one of SEQ ID NOs: 12-127 and 361-362, or SEQ ID NOs: 192-307 and 363-364) with 1, 2, 3, 4, 5, 6, 7, 8, 9 or 10 amino acid residue substitutions in the novel AAV capsid sequence (e.g., any one of SEQ ID NOs: 12-127 and 361-362 or SEQ ID NOs: 192-307 and 363-364) changed.

[0113] In another specific embodiment, a modified novel AAV capsid amino acid sequence of the disclosure comprises a fragment of a novel AAV capsid amino acid sequence (e.g., any one of SEQ ID NOs: 12-127 and 361-362) with 1, 2, 3, 4, 5, 6, 7, 8, 9 or 10 conservative amino acid residue substitutions in the novel AAV capsid amino acid sequence (e.g., any one of SEQ ID NOs: 12-127 and 361-362).

[0114] Alignment of the novel AAV VP1 amino acid sequence(s) provided herein with other VP1 amino acid sequences to various AAV references (see Table 4) can be used identify conserved and variable regions of the novel AAV VP1 capsid proteins. Using such an analysis, 1, 2, 3, 4, 5, 6, 7, 8, 9, 10, 11, 12 or more variable regions (including GBS and GH loop) in the capsid protein can be identified. In certain embodiments, presented herein are modified novel AAV capsid sequences comprising mutation(s) in one or more of a conversed and or variable region.

[0115] In some embodiments, there are 9 VRs in the capsid protein (denoted herein as VRI-VR IX). In certain embodiments, a modified novel AAV capsid sequence comprises a novel AAV capsid sequence with mutations (e.g., substitutions, insertions and/or deletions) 1, 2, 3, 4, 5, 6, 7, 8 or all 9 variable regions. In another specific embodiment, a modified novel AAV capsid sequence of the disclosure comprises a novel AAV capsid amino acid sequence (e.g., any one of SEQ ID NOs: 12-127 and 361-362) with 1, 2, 3, 4, 5, 6, 7, 8, 9 or 10 conservative amino acid residue substitutions in 1, 2, 3, 4, 5, 6, 7, 8 or all 9 variable regions of the novel AAV amino acid capsid sequence (e.g., any one of SEQ ID NOs: 12-127 and 361-362). In another specific embodiment, a modified novel AAV capsid amino acid sequence of the disclosure comprises a novel AAV capsid amino acid sequence (e.g., any one of SEQ ID NOs: 12-127 and 361-362) with 11, 12, 13, 14, 15, 16, 17, 18, 19, or 20 conservative amino acid residue substitutions in 1, 2, 3, 4, 5, 6, 7, 8 or all 9 variable regions of the novel AAV capsid amino acid sequence (e.g., any one of SEQ ID NOs: 12-127 and 361-362).

[0116] In another specific embodiment, a modified novel AAV capsid sequence of the disclosure comprises a fragment of a novel AAV capsid amino acid sequence (e.g., any one of SEQ ID NOs: 12-127 and 361-362) with 1, 2, 3, 4, 5, 6, 7, 8, 9 or 10 conservative amino acid residue substitutions in 1, 2, 3, 4, 5, 6, 7, 8 or all 9 variable regions of the novel AAV capsid amino acid sequence (e.g., any one of SEQ ID NOs: 12-127 and 361-362).

[0117] In certain embodiments, a modified novel AAV capsid sequence comprises a novel AAV capsid sequence with mutations (e.g., substitutions, insertions and/or deletions) in the GBS, GH loop, or both the GBS and GH loop. In another specific embodiment, a modified novel AAV capsid sequence of the disclosure comprises a novel AAV capsid amino acid sequence (e.g., any one of SEQ ID NOs: 12-127 and 361-362) with 1, 2, 3, 4, 5, 6, 7, 8, 9 or 10 conservative amino acid residue substitutions in the GBS, GH loop, or both the GBS and GH loop of the novel AAV amino acid capsid sequence (e.g., any one of SEQ ID NOs: 12-127 and 361-362).

[0118] In another specific embodiment, a modified novel AAV capsid amino acid sequence of the disclosure comprises a novel AAV capsid amino acid sequence (e.g., any one of SEQ ID NOs: 12-127 and 361-362) with 11, 12, 13, 14, 15, 16, 17, 18, 19 or 20 conservative amino acid residue substitutions in the GBS, GH loop, or both the GBS and GH loop of the novel AAV capsid amino acid sequence (e.g., any one of SEQ ID NOs: 12-127 and 361-362).

[0119] In another specific embodiment, a modified novel AAV capsid sequence of the disclosure comprises a fragment of a novel AAV capsid amino acid sequence (e.g., any one of SEQ ID NOs: 12-127 and 361-362) with 1, 2, 3, 4, 5, 6, 7, 8, 9 or 10 conservative amino acid residue substitutions in the GBS, GH loop, or both the GBS and GH loop of the novel AAV capsid amino acid sequence (e.g., any one of SEQ ID NOs: 12-127 and 361-362).

[0120] In certain embodiments, a modified novel AAV capsid sequence comprises a novel AAV capsid sequence with mutations (e.g., substitutions, insertions and/or deletions) 1, 2, 3, 4, 5, 6, 7, 8 or all 9 variable regions and GBS. In another specific embodiment, a modified novel AAV capsid sequence of the disclosure comprises a novel AAV capsid amino acid sequence (e.g., any one of SEQ ID NOs: 12-127 and 361-362) with 1, 2, 3, 4, 5, 6, 7, 8, 9 or 10 conservative amino acid residue substitutions in 1, 2, 3, 4, 5, 6, 7, 8 or all 9 variable regions and GBS of the novel AAV amino acid capsid sequence (e.g., any one of SEQ ID NOs: 12-127 and 361-362).

[0121] In another specific embodiment, a modified novel AAV capsid amino acid sequence of the disclosure comprises a novel AAV capsid amino acid sequence (e.g., any one of SEQ ID NOs: 12-127 and 361-362) with 11, 12, 13, 14, 15, 16, 17, 18, 19 or 20 conservative amino acid residue substitutions in 1, 2, 3, 4, 5, 6, 7, 8 or all 9 variable regions and GBS of the novel AAV capsid amino acid sequence (e.g., any one of SEQ ID NOs: 12-127 and 361-362).

[0122] In another specific embodiment, a modified novel AAV capsid sequence of the disclosure comprises a fragment of a novel AAV capsid amino acid sequence (e.g., any one of SEQ ID NOs: 12-127 and 361-362) with 1, 2, 3, 4, 5, 6, 7, 8, 9 or 10 conservative amino acid residue substitutions in 1, 2, 3, 4, 5, 6, 7, 8 or all 9 variable regions and GBS of the novel AAV capsid amino acid sequence (e.g., any one of SEQ ID NOs: 12-127 and 361-362).

[0123] In certain embodiments, a modified novel AAV capsid sequence comprises a novel AAV capsid sequence with mutations (e.g., substitutions, insertions and/or deletions) 1, 2, 3, 4, 5, 6, 7, 8 or all 9 variable regions and GH loop. In another specific embodiment, a modified novel AAV capsid sequence of the disclosure comprises a novel AAV capsid amino acid sequence (e.g., any one of SEQ ID NOs: 12-127 and 361-362) with 1, 2, 3, 4, 5, 6, 7, 8, 9 or 10 conservative amino acid residue substitutions in 1, 2, 3, 4, 5, 6, 7, 8 or all 9 variable regions and GH loop of the novel AAV amino acid capsid sequence (e.g., any one of SEQ ID NOs: 12-127 and 361-362). In another specific embodiment, a modified novel AAV capsid amino acid sequence of the disclosure comprises a novel AAV capsid amino acid sequence (e.g., any one of SEQ ID NOs: 12-127 and 361-362) with 11, 12, 13, 14, 15, 16, 17, 18, 19 or 20 conservative amino acid residue substitutions in 1, 2, 3, 4, 5, 6, 7, 8 or all 9 variable regions and GH loop of the novel AAV capsid amino acid sequence (e.g., any one of SEQ ID NOs: 12-127 and 361-362).

[0124] In another specific embodiment, a modified novel AAV capsid sequence of the disclosure comprises a fragment of a novel AAV capsid amino acid sequence (e.g., any one of SEQ ID NOs: 12-127 and 361-362) with 1, 2, 3, 4, 5, 6, 7, 8, 9 or 10 conservative amino acid residue substitutions in 1, 2, 3, 4, 5, 6, 7, 8 or all 9 variable regions and GH loop of the novel AAV capsid amino acid sequence (e.g., any one of SEQ ID NOs: 12-127 and 361-362). In certain embodiments, a modified novel AAV capsid sequence comprises a novel AAV capsid sequence with mutations (e.g., substitutions, insertions and/or deletions) 1, 2, 3, 4, 5, 6, 7, 8 or all 9 variable regions, GH loop and GBS. In another specific embodiment, a modified novel AAV capsid sequence of the disclosure comprises a novel AAV capsid amino acid sequence (e.g., any one of SEQ ID NOs: 12-127 and 361-362) with 1, 2, 3, 4, 5, 6, 7, 8, 9 or 10 conservative amino acid residue substitutions in 1, 2, 3, 4, 5, 6, 7, 8 or all 9 variable regions, GH loop and GBS of the novel AAV amino acid capsid sequence (e.g., any one of SEQ ID NOs: 12-127 and 361-362).

[0125] In another specific embodiment, a modified novel AAV capsid amino acid sequence of the disclosure comprises a novel AAV capsid amino acid sequence (e.g., any one of SEQ ID NOs: 12-127 and 361-362) with 11, 12, 13, 14, 15, 16, 17, 18, 19, or 20 conservative amino acid residue substitutions in 1, 2, 3, 4, 5, 6, 7, 8, or all 9 variable regions, GH loop and GBS of the novel AAV capsid amino acid sequence (e.g., any one of SEQ ID NOs: 12-127 and 361-362).

[0126] In another specific embodiment, a modified novel AAV capsid sequence of the disclosure comprises a fragment of a novel AAV capsid amino acid sequence (e.g., any one of SEQ ID NOs: 12-127 and 361-362) with 1, 2, 3, 4, 5, 6, 7, 8, 9, or 10 conservative amino acid residue substitutions in 1, 2, 3, 4, 5, 6, 7, 8, or all 9 variable regions, GH loop and GBS of the novel AAV capsid amino acid sequence (e.g., any one of SEQ ID NOs: 12-127 and 361-362).

[0127] In certain embodiments, a modified novel AAV capsid sequence of the disclosure comprises an AAV capsid amino acid sequence of a first novel AAV capsid protein (e.g., any one of SEQ ID NOs: 12-127 and 361-362) with 1, 2, 3, 4, 5, 6, 7, 8 or all 9 variable regions of a second AAV capsid protein (e.g., a different AAV serotype), wherein the first and second AAV capsid proteins are different. In specific embodiments, a modified novel AAV capsid sequence of the disclosure comprises a an AAV capsid amino acid sequence of a first novel AAV capsid protein (e.g., any one of SEQ ID NOs: 12-127 and 361-362) with 1, 2, 3, 4, 5, 6, 7, 8 or all 9 variable regions of a second novel AAV capsid protein, wherein the first and second AAV capsid proteins are different. In certain embodiments, the second AAV capsid protein (e.g., second novel AAV capsid protein) is a member of a different clade than the first novel AAV capsid protein. In some embodiments, the second AAV capsid protein (e.g., second novel AAV capsid protein) is a different AAV serotype within the same clade as the first novel AAV capsid protein. In specific embodiments, 1, 2, 3, 4, 5, 6, 7, 8, or all 9 of the variable regions in the first and second AAV capsid proteins are different.

[0128] In certain embodiments, a modified novel AAV capsid sequence of the disclosure comprises an AAV capsid amino acid sequence of a first novel AAV capsid protein (e.g., any one of SEQ ID NOs: 12-127 and 361-362) with one or more variable regions of a second AAV capsid protein (e.g., a different AAV serotype), wherein the first and second AAV capsid proteins are different. In specific embodiments, a modified novel AAV capsid sequence of the disclosure comprises an AAV capsid amino acid sequence of a first novel AAV capsid protein (e.g., any one of SEQ ID NOs: 12-127 and 361-362) with one or more variable regions of a second novel AAV capsid protein, wherein the first and second AAV capsid proteins are different. In certain embodiments, the second AAV capsid protein (e.g., second novel AAV capsid protein) is a member of a different clade than the first novel AAV capsid protein. In some embodiments, the second AAV capsid protein (e.g., second novel AAV capsid protein) is a different AAV serotype within the same clade as the first novel AAV capsid protein. In specific embodiments, the one or more variable regions in the first and second AAV capsid proteins are different.

[0129] In certain embodiments, a modified novel AAV capsid sequence of the disclosure comprises an AAV capsid amino acid sequence of a first novel AAV capsid protein (e.g., any one of SEQ ID NOs: 12-127 and 361-362) with a GBS, GH loop or both a GBS and GH loop of a second AAV capsid protein (e.g., a different AAV serotype), wherein the first and second AAV capsid proteins are different. In certain embodiments, the second AAV capsid protein is a member of a different clade than the first novel AAV capsid protein. In some embodiments, the second AAV capsid protein is a different AAV serotype within the same clade as the first novel AAV capsid protein. In specific embodiments, the GBS, GH loop, or both the GBS and GH loop in the first and second AAV capsid proteins are different.

[0130] In specific embodiments, a modified novel AAV capsid sequence of the disclosure comprises an AAV capsid amino acid sequence of a first novel AAV capsid protein (e.g., any one of SEQ ID NOs: 12-127 and 361-362) with GBS, GH loop or both a GBS and GH loop of a second novel AAV capsid protein, wherein the first and second AAV capsid proteins are different. In certain embodiments, the second novel AAV capsid protein is a member of a different clade than the first novel AAV capsid protein. In some embodiments, the second novel AAV capsid protein is a different AAV serotype within the same clade as the first novel AAV capsid protein. In specific embodiments, the GBS, GH loop, or both the GBS and GH loop in the first and second novel AAV capsid proteins are different.

[0131] In certain embodiments, a modified novel AAV capsid sequence of the disclosure comprises a an AAV capsid amino acid sequence of a first novel AAV capsid protein (e.g., any one of SEQ ID NOs: 12-127 and 361-362) with 1, 2, 3, 4, 5, 6, 7, 8 or all 9 variable regions, and GBS of a second AAV capsid protein (e.g., a different AAV serotype), wherein the first and second AAV capsid proteins are different. In certain embodiments, the second AAV capsid protein is a member of a different clade than the first novel AAV capsid protein. In some embodiments, the second AAV capsid protein is a different AAV serotype within the same clade as the first novel AAV capsid protein. In specific embodiments, the 1, 2, 3, 4, 5, 6, 7, 8 or all variable regions, and GBS in the first and second AAV capsid proteins are different.

[0132] In specific embodiments, a modified novel AAV capsid sequence of the disclosure comprises an AAV capsid amino acid sequence of a first AAV capsid protein (e.g., any one of SEQ ID NOs: 12-127 and 361-362) with 1, 2, 3, 4, 5, 6, 7, 8 or all 9 variable regions and GBS of a second novel AAV capsid protein, wherein the first and second AAV capsid proteins are different. In certain embodiments, the second novel AAV capsid protein is a member of a different clade than the first novel AAV capsid protein. In some embodiments, the second novel AAV capsid protein is a different AAV serotype within the same clade as the first novel AAV capsid protein. In specific embodiments, 1, 2, 3, 4, 5, 6, 7, 8, or all 9 of the variable regions and GBS in the first and second novel AAV capsid proteins are different.

[0133] In certain embodiments, a modified novel AAV capsid sequence of the disclosure comprises an AAV capsid amino acid sequence of a first AAV capsid protein (e.g., any one of SEQ ID NOs: 12-127 and 361-362) with one or more variable regions and GBS of a second AAV capsid protein (e.g., a different AAV serotype), wherein the first and second AAV capsid proteins are different. In certain embodiments, the second AAV capsid protein is a member of a different clade than the first novel AAV capsid protein. In some embodiments, the second AAV capsid protein is a different AAV serotype within the same clade as the first novel AAV capsid protein. In specific embodiments, the one or more variable regions and GBS in the first and second AAV capsid proteins are different.

[0134] In specific embodiments, a modified novel AAV capsid sequence of the disclosure comprises an AAV capsid amino acid sequence of a first AAV capsid (e.g., any one of SEQ ID NOs: 12-127 and 361-362) with one or more variable regions and GBS of a second novel AAV capsid protein, wherein the first and second AAV capsid proteins are different. In certain embodiments, the second novel AAV capsid protein is a member of a different clade than the first novel AAV capsid protein. In some embodiments, the second novel AAV capsid protein is a different AAV serotype within the same clade as the first novel AAV capsid protein. In specific embodiments, the one or more variable regions and GBS in the first and second novel AAV capsid proteins are different.

[0135] In certain embodiments, a modified novel AAV capsid sequence of the disclosure comprises an AAV capsid amino acid sequence of a first novel AAV capsid protein (e.g., any one of SEQ ID NOs: 12-127 and 361-362) with 1, 2, 3, 4, 5, 6, 7, 8 or all 9 variable regions (e.g., any one of, a combination thereof, or all of VRI-VRIX), and GH loop of a second AAV capsid protein (e.g., a different AAV serotype), wherein the first and second AAV capsid proteins are different. In certain embodiments, the second AAV capsid protein is a member of a different clade than the first novel AAV capsid protein. In some embodiments, the second AAV capsid protein is a different AAV serotype within the same clade as the first novel AAV capsid protein. In specific embodiments, the 1, 2, 3, 4, 5, 6, 7, 8 or all 9 variable regions, and GH loop in the first and second AAV capsid proteins are different.

[0136] In specific embodiments, a modified novel AAV capsid sequence of the disclosure comprises an AAV capsid amino acid sequence of a first novel AAV capsid (e.g., any one of SEQ ID NOs: 12-127 and 361-362) with 1, 2, 3, 4, 5, 6, 7, 8 or all 9 variable regions (e.g., any one of, a combination thereof, or all of VRI-VRIX) and GH loop of a second novel AAV capsid protein, wherein the first and second AAV capsid proteins are different. In certain embodiments, the second novel AAV capsid protein is a member of a different clade than the first novel AAV capsid protein. In some embodiments, the second novel AAV capsid protein is a different AAV serotype within the same clade as the first novel AAV capsid protein. In specific embodiments, 1, 2, 3, 4, 5, 6, 7, 8, or all 9 of the variable regions and GH loop in the first and second novel AAV capsid proteins are different.

[0137] In certain embodiments, a modified novel AAV capsid sequence of the disclosure comprises an AAV capsid amino acid sequence of a first novel AAV capsid protein (e.g., any one of SEQ ID NOs: 12-127 and 361-362) with one or more variable regions and GH loop of a second AAV capsid protein (e.g., a different AAV serotype), wherein the first and second AAV capsid proteins are different. In specific embodiments, a modified novel AAV capsid sequence of the disclosure comprises a first novel AAV capsid amino acid sequence (e.g., any one of SEQ ID NOs: 12-127 and 361-362) with one or more variable regions and GH loop of a second novel AAV capsid protein, wherein the first and second AAV capsid proteins are different. In certain embodiments, the second AAV capsid protein (e.g., second novel AAV capsid protein) is a member of a different clade than the first novel AAV capsid protein. In some embodiments, the second AAV capsid protein (e.g., second novel AAV capsid protein) is a different AAV serotype within the same clade as the first novel AAV capsid protein. In specific embodiments, the one or more variable regions and GH loop in the first and second AAV capsid proteins are different.

[0138] In certain embodiments, a modified novel AAV capsid sequence of the disclosure comprises an AAV capsid amino acid sequence of a first novel AAV capsid protein (e.g., any one of SEQ ID NOs: 12-127 and 361-362) with 1, 2, 3, 4, 5, 6, 7, 8 or all 9 variable regions (e.g., any one of, a combination thereof, or all of VRI-VRIX), GBS, and GH loop of a second AAV capsid protein (e.g., a different AAV serotype), wherein the first and second AAV capsid proteins are different. In certain embodiments, the second AAV capsid protein is a member of a different clade than the first novel AAV capsid protein. In some embodiments, the second AAV capsid protein is a different AAV serotype within the same clade as the first novel AAV capsid protein. In specific embodiments, the 1, 2, 3, 4, 5, 6, 7, 8 or all 9 variable regions, GBS, and GH loop in the first and second AAV capsid proteins are different.

[0139] In specific embodiments, a modified novel AAV capsid sequence of the disclosure comprises an AAV capsid amino acid sequence of a first AAV capsid protein (e.g., any one of SEQ ID NOs: 12-127 and 361-362) with 1, 2, 3, 4, 5, 6, 7, 8 or all 9 variable regions (e.g., any one of, a combination thereof, or all of VRI-VRIX), GBS, and GH loop of a second novel AAV capsid protein, wherein the first and second AAV capsid proteins are different. In certain embodiments, the second novel AAV capsid protein is a member of a different clade than the first novel AAV capsid protein. In some embodiments, the second novel AAV capsid protein is a different AAV serotype within the same clade as the first novel AAV capsid protein. In specific embodiments, 1, 2, 3, 4, 5, 6, 7, 8, or all 9 of the variable regions (e.g., any one of, a combination thereof, or all of VRI-VRIX), GBS, and GH loop in the first and second novel AAV capsid proteins are different.

[0140] In certain embodiments, a modified novel AAV capsid sequence of the disclosure comprises an AAV capsid amino acid sequence of a first novel AAV capsid (e.g., any one of SEQ ID NOs: 12-127 and 361-362) with one or more variable regions (e.g., any one of, a combination thereof, or all of VRI-VRIX), GBS, and GH loop of a second AAV capsid protein (e.g., a different AAV serotype), wherein the first and second AAV capsid proteins are different. In specific embodiments, a modified novel AAV capsid sequence of the disclosure comprises an AAV capsid amino acid sequence of a first novel AAV capsid (e.g., any one of SEQ ID NOS: 12-127 and 361-362) with one or more variable regions (e.g., any one of, a combination thereof, or all of VRI-VRIX), GBS, and GH loop of a second novel AAV capsid protein, wherein the first and second AAV capsid proteins are different. In certain embodiments, the second AAV capsid protein (e.g., second novel AAV capsid protein) is a member of a different clade than the first novel AAV capsid protein. In some embodiments, the second AAV capsid protein (e.g., second novel AAV capsid protein) is a different AAV serotype within the same clade as the first novel AAV capsid protein. In specific embodiments, the one or more variable regions, GBS, and GH loop in the first and second novel AAV capsid proteins are different.

[0141] Illustrative examples for conserved amino acid exchanges are amino acid substitutions that maintain structural and/or functional properties of the amino acids' side-chains, e.g., an aromatic amino acid is substituted for another aromatic amino acid, an acidic amino acid is substituted for another acidic amino acid, a basic amino acid is substituted for another basic amino acid, and an aliphatic amino acid is substituted for another aliphatic amino acid. In some embodiments, a conservative amino acid substitution is one in which the amino acid residue is replaced with an amino acid residue having a side chain with a similar charge. Families of amino acid residues having side chains with similar charges have been defined in the art. These families include amino acids with basic side chains (e.g., lysine, arginine, histidine), acidic side chains (e.g., aspartic acid, glutamic acid), uncharged polar side chains (e.g., asparagine, glutamine, serine, threonine, tyrosine, cysteine), nonpolar side chains (e.g., glycine, alanine, valine, leucine, isoleucine, proline, phenylalanine, methionine, tryptophan), beta-branched side chains (e.g., threonine, valine, isoleucine) and aromatic side chains (e.g., tyrosine, phenylalanine, tryptophan, histidine). Standardized and accepted functionally equivalent amino acid substitutions are presented in Table 1. In contrast, examples of non-conserved amino acid exchanges are amino acid substitutions that do not maintain structural and/or functional properties of the amino acids' side-chains, e.g., an aromatic amino acid is substituted for a basic, acidic, or aliphatic amino acid, an acidic amino acid is substituted for an aromatic, basic, or aliphatic amino acid, a basic amino acid is substituted for an acidic, aromatic or aliphatic amino acid, and an aliphatic amino acid is substituted for an aromatic, acidic or basic amino acid.

TABLE 1
Conservative Amino Acid Substitutions

| Amino Acid Group | Conservative Substitutions |
|---|---|
| Nonpolar side chains | alanine, valine, leucine, glycine, |
| | isoleucine, proline, phenylalanine, |
| | methionine, tryptophan |
| Uncharged polar side | asparagine, glutamine, serine, threonine, |
| chains | tyrosine, cysteine |
| Beta-branched side chains | threonine, valine, isoleucine |
| Aromatic side chains | tyrosine, phenylalanine, tryptophan, |
| | histidine |
| Basic side chains or | lysine, arginine, histidine |
| positively charged R groups | |
| Acidic side chains or | aspartic acid, glutamic acid |
| negatively charged R groups | |

[0142] In some embodiments, a modified novel AAV nucleic acid capsid sequence comprises a codon that encodes an amino acid that is not naturally encoded. In certain embodiments, a modified novel AAV amino acid capsid sequence comprises an amino acid mutation(s) (e.g., substitution) that allows for modification of capsids after virion assembly. In some embodiments, a modified novel AAV sequence comprises amino acid changes resulting from capsid shuffling.

[0143] In various embodiments, a modified novel AAV capsid sequence comprises one or more additional binding moieties relative to a novel AAV capsid sequence (e.g., any one of SEQ ID NOs: 12-127 and 361-362, or SEQ ID NOs: 192-307 and 363-364). Examples of binding moieties are targeting peptides (e.g., receptors), monoclonal antibodies, bispecific F(ab′)₂, and antigen-binding fragments such as Fab fragments, Fvs, scFvs, tandem scFvs, and the like. In some embodiments, a modified novel AAV capsid sequence comprises a tissue-specific targeting peptide that improves delivery of the AAV to a particular tissue in the body or cell type.

[0144] The modification of an AAV capsid may result in an AAV viral particle with one, two, three or more, or more, or all of the of following: enhanced packaging yield, enhanced transduction efficiency, enhanced gene transfer efficiency, enhanced translation efficiency, enhanced tissue-specific infectivity (i.e., tropism), and/or the enhanced ability to evade immunity compared to a non-modified AAV viral particle or naturally occurring sequence (e.g., a reference sequence, such as in Table 4, infra). The enhanced activities of the AAV particle may be assessed in an in vitro or an in vivo assay known to one of skill in the art or described herein. For example, enhanced packaging yield may be assessed by Alkaline Gel Electrophoresis, ddPCR, qPCR, SEC-MALS (see WO2021/062164, which is incorporated herein in its entirety). Enhanced transduction efficiency may be assessed, e.g., in vitro cell based assays such as Example 5, qPCR, or RNA next-generation sequencing. Enhanced translation efficiency of a transgene may be assessed by, e.g., RT-ddPCR, Liquid Chromatography-Mass Spectrometry, or by associating a transgene and/or reporter that is detectable by enzymatic, radiographic, colorimetric, fluorescence or other spectrographic assays, fluorescent activating cell sorting assays (FACS), immunological assays, including enzyme linked immunosorbent assay (ELISA), radioimmunoassay (RIA) and immunohistochemistry (IHC) assays. Enhanced tissue-specific infectivity (i.e., tropism) may be assessed by, e.g., an in vivo imaging system (IVIS), such as those described in WO2018/022608 or WO2019/222136, each of which is incorporated herein in its entirety and in particular for its tissue specific AAV infectivity assays and disclosure. Briefly, AAV comprising a test capsid and expressing one or more detectable transgenes, for example a luciferase transgene (e.g., a Fluc or Fluc2 gene) and/or a green fluorescent protein (GFP) transgene, may be generated and tested in animals, e.g., mice, by introducing the AAV into the test animals at one or mor concentrations and at an appropriate time post-infection (e.g., at 3 and 5 weeks post-infection) measurement, for example imaging, of the detectable marker or markers may be performed In the case of a luciferase marker, for example, in vivo bioluminescent imaging may be employed, utilizing standard bioluminescent substrates and imaging devices. Whole animal imaging and/or organ imaging may be analyzed using living image software. Regions of interest may be traced surrounding each animal as well as individual organs to quantify the total flux (photons/second) being released. Total flux activity is a proxy for AAV infectivity/tropism. Enhanced ability to evade immunity (pre-exisiting immunity in host) may be assessed by, e.g., cell-based in vitro TI assays, in vivo TI assays (e.g., in mice), and enzyme-linked immunosorbent assay (ELISA)-based detection of total anticapsid antibody (TAb) assays, or an IVIg cell based in vitro transduction inhibition assay tests ability of plasma to block the in vitro transduction in cultured cells. See, for example, Example 4.

### 6.3.1.4.1 Codon Optimization

[0145] In some embodiments, a novel AAV capsid nucleic acid sequence is optimized by alternative or preferred codons usage for a particular host cell or delivery cell type. AAV nucleic acid sequences can be codon optimized using any software known in the art. For example, an AAV backbone can be codon optimized using software such as//https://github.com/CMRI-TVG/AAVcodons//.

### 6.3.2 Novel AAV Clades and AAV Branches

[0146] Clades for AAV serotypes were previously proposed by Gao, G et al. J Virol. (2004) June; 78 (12): 6381-6388, which is incorporated herein by reference in its entirety, based on more than 100 AAV isolates and grouped by their viral protein (VP) phylogenetic similarity. The present disclosure provides novel AAV clades based on previously described AAV reference isolates and more than 300 new AAV isolates and grouped by various structural features as provided in Sections 6.3.2.1-6.3.2.4 and/or functional features as provided in Sections 6.3.2.5.-6.3.2.6.

[0147] A novel AAV clade encompasses all structurally related AAV members, including but not limited to, naturally-occurring AAVs, non-naturally occurring AAVs, such as for example, recombinant, modified, chimeric, hybrid (i.e., derived from two or more different AAVs), synthetic, or artificial AAVs.

[0148] In specific embodiments, the present disclosure does not encompass AAV capsid proteins that are known in the art, such as AAV VP1 sequences disclosed in any one of Table 2 with a prefix other than “BCD”, or VP2 and VP3 capsid proteins derived therefrom. In specific embodiments, the present disclosure does not encompass the AAV capsid proteins (e.g., VP1, VP2 and/or VP3) of any of the AAVs listed in Table 4 or Item A or Item B.

### 6.3.2.1 Structural Homology of VP1, VP2, and VP3 Capsid Proteins

[0149] The present disclosure also provides AAV clades grouped by their structural homology of a VP1, VP2, or VP3 capsid protein. In some embodiments, an AAV member of a novel AAV clade of the disclosure has structural homology among the VP1, VP2, or VP3 amino acid sequences to another novel AAV capsid amino acid sequence provided by the present disclosure (e.g., “a novel reference capsid”).

[0150] Homologous proteins to a novel reference capsid can be identified using sequence similarity searches, such as BLAST (Altschul et al. (1997) Nucleic Acids Res. 25:3389-3402, units 3.3 and 3.4), PSI-BLAST (id.), SSEARCH (Smith and Waterman (1981) Mol. Biol. 147:195-197; Pearson (1991) Genomics 11:635-650, unit 3.10), FASTA (Pearson and Lipman (1988) Proc. Natl. Acad. Sci. USA. 85:2444-2448, unit 3.9) and the HMMER3 (Johnson et al. (2010) BMC Bioinformatics. 11:431), which produce accurate statistical estimates, ensuring protein sequences that share significant similarity also have similar structures. Structural homology can be inferred from statistically significant similarity in, e.g., a BLAST, FASTA, SSEARCH, HMMER, or ClustalW search. Local sequence alignments calculated by BLAST, SSEARCH, FASTA, HMMER, ClustalW can identify the most similar region between two sequences. Scoring matrices, such as BLOSUM (e.g., BLOSUM62 or BLOSUM50), may be used to detect very distant similarities, and have relatively low penalties for mismatched residues. In some embodiments, the similarity of two amino acid sequences is described in terms of a similarity score. In specific embodiments, the similarity of two amino acid sequences is described in terms of the percent similarity. In some other embodiments, the similarity of two amino acid sequences is described in terms of the percent identity.

[0151] In a specific embodiment, similarity between at least two amino acid sequences is accomplished using ClustalW. In certain specific embodiments, ClustalW with cost matrix BLOSUM, a gap open cost of 10, and a gap extend cost of 0.1 is used to determine the similarity between at least two amino acid sequences.

[0152] Structural homology of a capsid protein can be determined using the methods described herein to determine if a capsid protein (e.g., VP1, VP2, or VP3) has substantial homology (e.g., substantial amino acid similarity and/or amino acid similarity). In some embodiments, substantial homology (e.g., substantial amino acid identity and/or amino acid similarity) is across the full-length of capsid proteins (e.g., two VP1 capsid proteins, two VP2 capsid proteins, or two VP3 capsid proteins). In certain embodiments, substantial homology (e.g., substantial amino acid identity and/or amino acid similarity) is across a fragment of two capsid proteins (e.g., a fragment of two VP1 capsid proteins, a fragment of two VP2 capsid proteins, or a fragment of two VP3 capsid proteins).

[0153] In a specific embodiment, a capsid protein (e.g., VP1, VP2, or VP3) has substantial homology if there is about 90% to 99% similarity and/or identity to another capsid protein (e.g., VP1, VP2 or VP3) using a technique described herein (e.g., ClustalW) or known to one of skill in the art.

[0154] In some embodiments, a VP1 capsid protein has substantial homology if there is about 90% to 99% similarity and/or identity to a VP1 capsid protein in any one of Table 9 using a technique described herein (e.g., ClustalW) or known to one of skill in the art. In specific embodiments, the VP1 capsid protein is one provided in Table 9 with a “BCD_” prefix.

[0155] In another specific embodiment, a VP1 capsid protein has substantial homology if there is about 90% to 99% similarity and/or identity to a VP1 capsid protein in any one of Table 2 using a technique described herein (e.g., ClustalW) or known to one of skill in the art. In another specific embodiment, a VP1 capsid protein has substantial homology if there is about 90% to 99% similarity and/or identity to VP1 capsid protein No. 0 in any one of Table 2 using a technique described herein (e.g., ClustalW) or known to one of skill in the art.

[0156] In some embodiments, a VP1 capsid protein has structural homology with a VP1 capsid protein in an AAV clade in any one of Table 2 if there is at least about 90% identity between the VP1 capsid amino acid sequences using a technique described herein (e.g., ClustalW) or known to one of skill in the art. In a specific embodiment, a VP1 capsid protein has structural homology with VP1 capsid protein No. 0 in an AAV clade in any one of Table 2 if there is at least about 91% identity between the VP1 capsid amino acid sequences using a technique described herein (e.g., ClustalW) or known to one of skill in the art. In some embodiments, a VP1 capsid protein has structural homology with a VP1 capsid protein in an AAV clade in any one of Table 2 if there is at least about 91% identity between the VP1 capsid amino acid sequences using a technique described herein (e.g., ClustalW) or known to one of skill in the art. In a specific embodiment, a VP1 capsid protein has structural homology with VP1 capsid protein No. 0 in an AAV clade in any one of Table 2 if there is at least about 91% identity between the VP1 capsid amino acid sequences using a technique described herein (e.g., ClustalW) or known to one of skill in the art. In some embodiments, a VP1 capsid protein has structural homology with a VP1 capsid protein in an AAV clade in any one of Table 2 if there is at least about 92% identity between the VP1 capsid amino acid sequences using a technique described herein (e.g., ClustalW) or known to one of skill in the art. In a specific embodiment, a VP1 capsid protein has structural homology with VP1 capsid protein No. 0 in an AAV clade in any one of Table 2 if there is at least about 92% identity between the VP1 capsid amino acid sequences using a technique described herein (e.g., ClustalW) or known to one of skill in the art. In some embodiments, a VP1 capsid protein has structural homology with a VP1 capsid protein in an AAV clade in any one of Table 2 if there is at least about 93% identity between the VP1 capsid amino acid sequences using a technique described herein (e.g., ClustalW) or known to one of skill in the art. In a specific embodiment, a VP1 capsid protein has structural homology with VP1 capsid protein No. 0 in an AAV clade in any one of Table 2 if there is at least about 93% identity between the VP1 capsid amino acid sequences using a technique described herein (e.g., ClustalW) or known to one of skill in the art. In some embodiments, a VP1 capsid protein has structural homology with a VP1 capsid protein in an AAV clade in any one of Table 2 if there is at least about 94% identity between the VP1 capsid amino acid sequences using a technique described herein (e.g., ClustalW) or known to one of skill in the art. In a specific embodiment, a VP1 capsid protein has structural homology with VP1 capsid protein No. 0 in an AAV clade in any one of Table 2 if there is at least about 94% identity between the VP1 capsid amino acid sequences using a technique described herein (e.g., ClustalW) or known to one of skill in the art. In some embodiments, a VP1 capsid protein has structural homology with a VP1 capsid protein in an AAV clade in any one of Table 2 if there is at least about 95% identity between the VP1 capsid amino acid sequences using a technique described herein (e.g., ClustalW) or known to one of skill in the art. In a specific embodiment, a VP1 capsid protein has structural homology with VP1 capsid protein No. 0 in an AAV clade in any one of Table 2 if there is at least about 95% identity between the VP1 capsid amino acid sequences using a technique described herein (e.g., ClustalW) or known to one of skill in the art. In some embodiments, a VP1 capsid protein has structural homology with a VP1 capsid protein in an AAV clade in any one of Table 2 if there is at least about 96% identity between the VP1 capsid amino acid sequences using a technique described herein (e.g., ClustalW) or known to one of skill in the art. In a specific embodiment, a VP1 capsid protein has structural homology with VP1 capsid protein No. 0 in an AAV clade in any one of Table 2 if there is at least about 96% identity between the VP1 capsid amino acid sequences using a technique described herein (e.g., ClustalW) or known to one of skill in the art. In some embodiments, a VP1 capsid protein has structural homology with a VP1 capsid protein in an AAV clade in any one of Table 2 if there is at least about 97% identity between the VP1 capsid amino acid sequences using a technique described herein (e.g., ClustalW) or known to one of skill in the art. In a specific embodiment, a VP1 capsid protein has structural homology with VP1 capsid protein No. 0 in an AAV clade in any one of Table 2 if there is at least about 97% identity between the VP1 capsid amino acid sequences using a technique described herein (e.g., ClustalW) or known to one of skill in the art. In some embodiments, a VP1 capsid protein has structural homology with a VP1 capsid protein in an AAV clade in any one of Table 2 if there is at least about 98% identity between the VP1 capsid amino acid sequences using a technique described herein (e.g., ClustalW) or known to one of skill in the art. In a specific embodiment, a VP1 capsid protein has structural homology with VP1 capsid protein of No. 0 in an AAV clade in any one of Table 2 if there is at least about 98% identity between the VP1 capsid amino acid sequences using a technique described herein (e.g., ClustalW) or known to one of skill in the art. In some embodiments, a VP1 capsid protein has structural homology with a VP1 capsid protein in an AAV clade in any one of Table 2 if there is at least about 99% identity between the VP1 capsid amino acid sequences using a technique described herein (e.g., ClustalW) or known to one of skill in the art. In a specific embodiment, a VP1 capsid protein has structural homology with VP1 capsid protein of No. 0 in an AAV clade in any one of Table 2 if there is at least about 99% identity between the VP1 capsid amino acid sequences using a technique described herein (e.g., ClustalW) or known to one of skill in the art.

[0157] In some embodiments, a capsid protein has substantial similarity if there is about 90% to 99% similarity to another capsid protein (e.g., VP1, VP2 or VP3) using a technique described herein (e.g., ClustalW) or known to one of skill in the art. In some embodiments, a capsid protein has substantial similarity if there is about 90% similarity to another capsid protein (e.g., VP1, VP2 or VP3) using a technique described herein (e.g., ClustalW) or known to one of skill in the art. In some embodiments, a capsid protein has substantial similarity if there is about 91% similarity to another capsid protein (e.g., VP1, VP2 or VP3) using a technique described herein (e.g., ClustalW) or known to one of skill in the art. In some embodiments, a capsid protein has substantial similarity if there is about 92% similarity to another capsid protein (e.g., VP1, VP2 or VP3) using a technique described herein (e.g., ClustalW) or known to one of skill in the art. In some embodiments, a capsid protein has substantial similarity if there is about 93% similarity to another capsid protein (e.g., VP1, VP2 or VP3) using a technique described herein (e.g., ClustalW) or known to one of skill in the art. In some embodiments, a capsid protein has substantial similarity if there is about 94% similarity to another capsid protein (e.g., VP1, VP2 or VP3) using a technique described herein (e.g., ClustalW) or known to one of skill in the art. In some embodiments, a capsid protein has substantial similarity if there is about 95% similarity to another capsid protein (e.g., VP1, VP2 or VP3) using a technique described herein (e.g., ClustalW) or known to one of skill in the art. In some embodiments, a capsid protein has substantial similarity if there is about 96% similarity to another capsid protein (e.g., VP1, VP2 or VP3) using a technique described herein (e.g., ClustalW) or known to one of skill in the art. In some embodiments, a capsid protein has substantial similarity if there is about 97% similarity to another capsid protein (e.g., VP1, VP2 or VP3) using a technique described herein (e.g., ClustalW) or known to one of skill in the art. In some embodiments, a capsid protein has substantial similarity if there is about 98% similarity to another capsid protein (e.g., VP1, VP2 or VP3) using a technique described herein (e.g., ClustalW) or known to one of skill in the art. In some embodiments, a capsid protein has substantial similarity if there is about 99% similarity to another capsid protein (e.g., VP1, VP2 or VP3) using a technique described herein (e.g., ClustalW) or known to one of skill in the art.

[0158] In some embodiments, a VP1 capsid protein has substantial similarity if there is about 90% to 99% similarity to a VP1 capsid protein in any one of Table 9 using a technique described herein (e.g., ClustalW) or known to one of skill in the art. In some embodiments, a VP1 capsid protein has substantial similarity if there is about 90% similarity to a VP1 capsid protein in any one of Table 9 using a technique described herein (e.g., ClustalW) or known to one of skill in the art. In some embodiments, a VP1 capsid protein has substantial similarity if there is about 91% similarity to a VP1 capsid protein in any one of Table 9 using a technique described herein (e.g., ClustalW) or known to one of skill in the art. In some embodiments, a VP1 capsid protein has substantial similarity if there is about 92% similarity to a VP1 capsid protein in any one of Table 9 using a technique described herein (e.g., ClustalW) or known to one of skill in the art. In some embodiments, a VP1 capsid protein has substantial similarity if there is about 93% similarity to a VP1 capsid protein in any one of Table 9 using a technique described herein (e.g., ClustalW) or known to one of skill in the art. In some embodiments, a VP1 capsid protein has substantial similarity if there is about 94% similarity to a VP1 capsid protein in any one of Table 9 using a technique described herein (e.g., ClustalW) or known to one of skill in the art. In some embodiments, a VP1 capsid protein has substantial similarity if there is about 95% similarity to a VP1 capsid protein in any one of Table 9 using a technique described herein (e.g., ClustalW) or known to one of skill in the art. In some embodiments, a VP1 capsid protein has substantial similarity if there is about 96% similarity to a VP1 capsid protein in any one of Table 9 using a technique described herein (e.g., ClustalW) or known to one of skill in the art. In some embodiments, a VP1 capsid protein has substantial similarity if there is about 97% similarity to a VP1 capsid protein in any one of Table 9 using a technique described herein (e.g., ClustalW) or known to one of skill in the art. In some embodiments, a VP1 capsid protein has substantial similarity if there is about 98% similarity to a VP1 capsid protein in any one of Table 9 using a technique described herein (e.g., ClustalW) or known to one of skill in the art. In some embodiments, a VP1 capsid protein has substantial similarity if there is about 99% similarity to a VP1 capsid protein in any one of Table 9 using a technique described herein (e.g., ClustalW) or known to one of skill in the art. In specific embodiments, the VP1 capsid protein is one provided in Table 9 with a “BCD_” prefix.

[0159] In another specific embodiment, a VP1 capsid protein has substantial similarity if there is about 90% to 99% similarity to a VP1 capsid protein in any one of Table 2 using a technique described herein (e.g., ClustalW) or known to one of skill in the art. In another specific embodiment, a VP1 capsid protein has substantial similarity if there is about 90% similarity to a VP1 capsid protein in any one of Table 2 using a technique described herein (e.g., ClustalW) or known to one of skill in the art. In another specific embodiment, a VP1 capsid protein has substantial similarity if there is about 91% similarity to a VP1 capsid protein in any one of Table 2 using a technique described herein (e.g., ClustalW) or known to one of skill in the art. In another specific embodiment, a VP1 capsid protein has substantial similarity if there is about 92% similarity to a VP1 capsid protein in any one of Table 2 using a technique described herein (e.g., ClustalW) or known to one of skill in the art. In another specific embodiment, a VP1 capsid protein has substantial similarity if there is about 93% similarity to a VP1 capsid protein in any one of Table 2 using a technique described herein (e.g., ClustalW) or known to one of skill in the art. In another specific embodiment, a VP1 capsid protein has substantial similarity if there is about 94% similarity to a VP1 capsid protein in any one of Table 2 using a technique described herein (e.g., ClustalW) or known to one of skill in the art. In another specific embodiment, a VP1 capsid protein has substantial similarity if there is about 95% similarity to a VP1 capsid protein in any one of Table 2 using a technique described herein (e.g., ClustalW) or known to one of skill in the art. In another specific embodiment, a VP1 capsid protein has substantial similarity if there is about 96% similarity to a VP1 capsid protein in any one of Table 2 using a technique described herein (e.g., ClustalW) or known to one of skill in the art. In another specific embodiment, a VP1 capsid protein has substantial similarity if there is about 97% similarity to a VP1 capsid protein in any one of Table 2 using a technique described herein (e.g., ClustalW) or known to one of skill in the art. In another specific embodiment, a VP1 capsid protein has substantial similarity if there is about 98% similarity to a VP1 capsid protein in any one of Table 2 using a technique described herein (e.g., ClustalW) or known to one of skill in the art. In another specific embodiment, a VP1 capsid protein has substantial similarity if there is about 99% similarity to a VP1 capsid protein in any one of Table 2 using a technique described herein (e.g., ClustalW) or known to one of skill in the art. In specific embodiments, the VP1 capsid protein with substantial similarity to a VP1 capsid protein in any one of Table 2 is not a known AAV. Table 9 provides the sequences of the VP1 capsid protein recited in any one of Table 2.

[0160] In another specific embodiment, a VP1 capsid protein has substantial similarity if there is about 90% to 99% similarity to VP1 capsid protein No. 0 in any one of Table 2 using a technique described herein (e.g., ClustalW) or known to one of skill in the art. In another specific embodiment, a VP1 capsid protein has substantial similarity if there is about 90% similarity to VP1 capsid protein No. 0 in any one of Table 2 using a technique described herein (e.g., ClustalW) or known to one of skill in the art. In another specific embodiment, a VP1 capsid protein has substantial similarity if there is about 91% similarity to VP1 capsid protein No. 0 in any one of Table 2 using a technique described herein (e.g., ClustalW) or known to one of skill in the art. In another specific embodiment, a VP1 capsid protein has substantial similarity if there is about 92% similarity to VP1 capsid protein No. 0 in any one of Table 2 using a technique described herein (e.g., ClustalW) or known to one of skill in the art. In another specific embodiment, a VP1 capsid protein has substantial similarity if there is about 93% similarity to VP1 capsid protein No. 0 in any one of Table 2 using a technique described herein (e.g., ClustalW) or known to one of skill in the art. In another specific embodiment, a VP1 capsid protein has substantial similarity if there is about 94% similarity to VP1 capsid protein No. 0 in any one of Table 2 using a technique described herein (e.g., ClustalW) or known to one of skill in the art. In another specific embodiment, a VP1 capsid protein has substantial similarity if there is about 95% similarity to VP1 capsid protein No. 0 in any one of Table 2 using a technique described herein (e.g., ClustalW) or known to one of skill in the art. In another specific embodiment, a VP1 capsid protein has substantial similarity if there is about 96% similarity to VP1 capsid protein No. 0 in any one of Table 2 using a technique described herein (e.g., ClustalW) or known to one of skill in the art. In another specific embodiment, a VP1 capsid protein has substantial similarity if there is about 97% similarity to VP1 capsid protein No. 0 in any one of Table 2 using a technique described herein (e.g., ClustalW) or known to one of skill in the art. In another specific embodiment, a VP1 capsid protein has substantial similarity if there is about 98% similarity to VP1 capsid protein No. 0 in any one of Table 2 using a technique described herein (e.g., ClustalW) or known to one of skill in the art. In another specific embodiment, a VP1 capsid protein has substantial similarity if there is about 99% similarity to VP1 capsid protein No. 0 in any one of Table 2 using a technique described herein (e.g., ClustalW) or known to one of skill in the art. In specific embodiments, the VP1 capsid protein with substantial similarity to a VP1 capsid protein of No. 0 in any one of Table 2 is not a known AAV.

[0161] In some embodiments, a capsid protein has substantial identity if there is about 90% to 99% identity to another capsid protein (e.g., VP1, VP2 or VP3) using a technique described herein (e.g., ClustalW) or known to one of skill in the art. In some embodiments, a capsid protein has substantial identity if there is about 90% identity to another capsid protein (e.g., VP1, VP2 or VP3) using a technique described herein (e.g., ClustalW) or known to one of skill in the art. In some embodiments, a capsid protein has substantial identity if there is about 91% identity to another capsid protein (e.g., VP1, VP2 or VP3) using a technique described herein (e.g., ClustalW) or known to one of skill in the art. In some embodiments, a capsid protein has substantial identity if there is about 92% identity to another capsid protein (e.g., VP1, VP2 or VP3) using a technique described herein (e.g., ClustalW) or known to one of skill in the art. In some embodiments, a capsid protein has substantial identity if there is about 93% identity to another capsid protein (e.g., VP1, VP2 or VP3) using a technique described herein (e.g., ClustalW) or known to one of skill in the art. In some embodiments, a capsid protein has substantial identity if there is about 94% identity to another capsid protein (e.g., VP1, VP2 or VP3) using a technique described herein (e.g., ClustalW) or known to one of skill in the art. In some embodiments, a capsid protein has substantial identity if there is about 95% identity to another capsid protein (e.g., VP1, VP2 or VP3) using a technique described herein (e.g., ClustalW) or known to one of skill in the art. In some embodiments, a capsid protein has substantial identity if there is about 96% identity to another capsid protein (e.g., VP1, VP2 or VP3) using a technique described herein (e.g., ClustalW) or known to one of skill in the art. In some embodiments, a capsid protein has substantial identity if there is about 97% identity to another capsid protein (e.g., VP1, VP2 or VP3) using a technique described herein (e.g., ClustalW) or known to one of skill in the art. In some embodiments, a capsid protein has substantial identity if there is about 98% identity to another capsid protein (e.g., VP1, VP2 or VP3) using a technique described herein (e.g., ClustalW) or known to one of skill in the art. In some embodiments, a capsid protein has substantial identity if there is about 99% identity to another capsid protein (e.g., VP1, VP2 or VP3) using a technique described herein (e.g., ClustalW) or known to one of skill in the art. In specific embodiments, a capsid protein with substantial identity is not a known AAV capsid. In specific embodiments, a capsid protein with substantial identity is a capsid protein provided herein (e.g., in Table 9) with the “BCD_” prefix.

[0162] In some embodiments, a VP1 capsid protein has substantial identity if there is about 90% to 99% identity to a VP1 capsid protein in any one of Table 9 using a technique described herein (e.g., ClustalW) or known to one of skill in the art. In some embodiments, a VP1 capsid protein has substantial identity if there is about 90% identity to a VP1 capsid protein in any one of Table 9 using a technique described herein (e.g., ClustalW) or known to one of skill in the art. In some embodiments, a VP1 capsid protein has substantial identity if there is about 91% identity to a VP1 capsid protein in any one of Table 9 using a technique described herein (e.g., ClustalW) or known to one of skill in the art. In some embodiments, a VP1 capsid protein has substantial identity if there is about 92% identity to a VP1 capsid protein in any one of Table 9 using a technique described herein (e.g., ClustalW) or known to one of skill in the art. In some embodiments, a VP1 capsid protein has substantial identity if there is about 93% identity to a VP1 capsid protein in any one of Table 9 using a technique described herein (e.g., ClustalW) or known to one of skill in the art. In some embodiments, a VP1 capsid protein has substantial identity if there is about 94% identity to a VP1 capsid protein in any one of Table 9 using a technique described herein (e.g., ClustalW) or known to one of skill in the art. In some embodiments, a VP1 capsid protein has substantial identity if there is about 95% identity to a VP1 capsid protein in any one of Table 9 using a technique described herein (e.g., ClustalW) or known to one of skill in the art. In some embodiments, a VP1 capsid protein has substantial identity if there is about 96% identity to a VP1 capsid protein in any one of Table 9 using a technique described herein (e.g., ClustalW) or known to one of skill in the art. In some embodiments, a VP1 capsid protein has substantial identity if there is about 97% identity to a VP1 capsid protein in any one of Table 9 using a technique described herein (e.g., ClustalW) or known to one of skill in the art. In some embodiments, a VP1 capsid protein has substantial identity if there is about 98% identity to a VP1 capsid protein in any one of Table 9 using a technique described herein (e.g., ClustalW) or known to one of skill in the art. In some embodiments, a VP1 capsid protein has substantial identity if there is about 99% identity to a VP1 capsid protein in any one of Table 9 using a technique described herein (e.g., ClustalW) or known to one of skill in the art. In specific embodiments, the VP1 capsid protein is one provided in Table 9 with a “BCD_” prefix. In specific embodiments, a capsid protein with substantial identity is not a known AAV capsid.

[0163] In another specific embodiment, a VP1 capsid protein has substantial identity if there is about 90% to 99% identity to a VP1 capsid protein in any one of Table 2 using a technique described herein (e.g., ClustalW) or known to one of skill in the art. In another specific embodiment, a VP1 capsid protein has substantial identity if there is about 90% identity to a VP1 capsid protein in any one of Table 2 using a technique described herein (e.g., ClustalW) or known to one of skill in the art. In another specific embodiment, a VP1 capsid protein has substantial identity if there is about 95% identity to a VP1 capsid protein in any one of Table 2 using a technique described herein (e.g., ClustalW) or known to one of skill in the art. In another specific embodiment, a VP1 capsid protein has substantial identity if there is about 96% identity to a VP1 capsid protein in any one of Table 2 using a technique described herein (e.g., ClustalW) or known to one of skill in the art. In another specific embodiment, a VP1 capsid protein has substantial identity if there is about 97% identity to a VP1 capsid protein in any one of Table 2 using a technique described herein (e.g., ClustalW) or known to one of skill in the art. In another specific embodiment, a VP1 capsid protein has substantial identity if there is about 98% identity to a VP1 capsid protein in any one of Table 2 using a technique described herein (e.g., ClustalW) or known to one of skill in the art. In another specific embodiment, a VP1 capsid protein has substantial identity if there is about 99% identity to a VP1 capsid protein in any one of Table 2 using a technique described herein (e.g., ClustalW) or known to one of skill in the art. In specific embodiments, the VP1 capsid protein with substantial identity to a VP1 capsid protein to a VP1 capsid protein in any one of Table 2 is not a known AAV.

[0164] In another specific embodiment, a VP1 capsid protein has substantial identity if there is about 90% to 99% identity to VP1 capsid protein No. 0 in any one of Table 2 using a technique described herein (e.g., ClustalW) or known to one of skill in the art. In another specific embodiment, a VP1 capsid protein has substantial identity if there is about 90% identity to VP1 capsid protein No. 0 in any one of Table 2 using a technique described herein (e.g., ClustalW) or known to one of skill in the art. In another specific embodiment, a VP1 capsid protein has substantial identity if there is about 95% identity to VP1 capsid protein No. 0 in any one of Table 2 using a technique described herein (e.g., ClustalW) or known to one of skill in the art. In another specific embodiment, a VP1 capsid protein has substantial identity if there is about 96% identity to VP1 capsid protein No. 0 in any one of Table 2 using a technique described herein (e.g., ClustalW) or known to one of skill in the art. In another specific embodiment, a VP1 capsid protein has substantial identity if there is about 97% identity to VP1 capsid protein No. 0 in any one of Table 2 using a technique described herein (e.g., ClustalW) or known to one of skill in the art. In another specific embodiment, a VP1 capsid protein has substantial identity if there is about 98% identity to VP1 capsid protein No. 0 in any one of Table 2 using a technique described herein (e.g., ClustalW) or known to one of skill in the art. In another specific embodiment, a VP1 capsid protein has substantial identity if there is about 99% identity to VP1 capsid protein No. 0 in any one of Table 2 using a technique described herein (e.g., ClustalW) or known to one of skill in the art. In specific embodiments, the VP1 capsid protein with substantial identity to a VP1 capsid protein of No. 0 in any one of Table 2 is not a known AAV.

[0165] In some embodiments, a VP1 capsid protein has structural homology with a VP1 capsid protein in an AAV clade in any one of Table 2 if there is at least about 90% identity between the VP1 capsid amino acid sequences using a technique described herein (e.g., ClustalW) or known to one of skill in the art. In a specific embodiment, a VP1 capsid protein has structural homology with VP1 capsid protein No. 0 in an AAV clade in any one of Table 2 if there is at least about 91% identity between the VP1 capsid amino acid sequences using a technique described herein (e.g., ClustalW) or known to one of skill in the art. In some embodiments, a VP1 capsid protein has structural homology with a VP1 capsid protein in an AAV clade in any one of Table 2 if there is at least about 91% identity between the VP1 capsid amino acid sequences using a technique described herein (e.g., ClustalW) or known to one of skill in the art. In a specific embodiment, a VP1 capsid protein has structural homology with VP1 capsid protein No. 0 in an AAV clade in any one of Table 2 if there is at least about 91% identity between the VP1 capsid amino acid sequences using a technique described herein (e.g., ClustalW) or known to one of skill in the art. In some embodiments, a VP1 capsid protein has structural homology with a VP1 capsid protein in an AAV clade in any one of Table 2 if there is at least about 92% identity between the VP1 capsid amino acid sequences using a technique described herein (e.g., ClustalW) or known to one of skill in the art. In a specific embodiment, a VP1 capsid protein has structural homology with VP1 capsid protein No. 0 in an AAV clade in any one of Table 2 if there is at least about 92% identity between the VP1 capsid amino acid sequences using a technique described herein (e.g., ClustalW) or known to one of skill in the art. In some embodiments, a VP1 capsid protein has structural homology with a VP1 capsid protein in an AAV clade in any one of Table 2 if there is at least about 93% identity between the VP1 capsid amino acid sequences using a technique described herein (e.g., ClustalW) or known to one of skill in the art. In a specific embodiment, a VP1 capsid protein has structural homology with VP1 capsid protein No. 0 in an AAV clade in any one of Table 2 if there is at least about 93% identity between the VP1 capsid amino acid sequences using a technique described herein (e.g., ClustalW) or known to one of skill in the art. In some embodiments, a VP1 capsid protein has structural homology with a VP1 capsid protein in an AAV clade in any one of Table 2 if there is at least about 94% identity between the VP1 capsid amino acid sequences using a technique described herein (e.g., ClustalW) or known to one of skill in the art. In a specific embodiment, a VP1 capsid protein has structural homology with VP1 capsid protein No. 0 in an AAV clade in any one of Table 2 if there is at least about 94% identity between the VP1 capsid amino acid sequences using a technique described herein (e.g., ClustalW) or known to one of skill in the art. In some embodiments, a VP1 capsid protein has structural homology with a VP1 capsid protein in an AAV clade in any one of Table 2 if there is at least about 95% identity between the VP1 capsid amino acid sequences using a technique described herein (e.g., ClustalW) or known to one of skill in the art. In a specific embodiment, a VP1 capsid protein has structural homology with VP1 capsid protein No. 0 in an AAV clade in any one of Table 2 if there is at least about 95% identity between the VP1 capsid amino acid sequences using a technique described herein (e.g., ClustalW) or known to one of skill in the art. In some embodiments, a VP1 capsid protein has structural homology with a VP1 capsid protein in an AAV clade in any one of Table 2 if there is at least about 96% identity between the VP1 capsid amino acid sequences using a technique described herein (e.g., ClustalW) or known to one of skill in the art. In a specific embodiment, a VP1 capsid protein has structural homology with VP1 capsid protein No. 0 in an AAV clade in any one of Table 2 if there is at least about 96% identity between the VP1 capsid amino acid sequences using a technique described herein (e.g., ClustalW) or known to one of skill in the art. In some embodiments, a VP1 capsid protein has structural homology with a VP1 capsid protein in an AAV clade in any one of Table 2 if there is at least about 97% identity between the VP1 capsid amino acid sequences using a technique described herein (e.g., ClustalW) or known to one of skill in the art. In a specific embodiment, a VP1 capsid protein has structural homology with VP1 capsid protein No. 0 in an AAV clade in any one of Table 2 if there is at least about 97% identity between the VP1 capsid amino acid sequences using a technique described herein (e.g., ClustalW) or known to one of skill in the art. In some embodiments, a VP1 capsid protein has structural homology with a VP1 capsid protein in an AAV clade in any one of Table 2 if there is at least about 98% identity between the VP1 capsid amino acid sequences using a technique described herein (e.g., ClustalW) or known to one of skill in the art. In a specific embodiment, a VP1 capsid protein has structural homology with VP1 capsid protein of No. 0 in an AAV clade in any one of Table 2 if there is at least about 98% identity between the VP1 capsid amino acid sequences using a technique described herein (e.g., ClustalW) or known to one of skill in the art. In some embodiments, a VP1 capsid protein has structural homology with a VP1 capsid protein in an AAV clade in any one of Table 2 if there is at least about 99% identity between the VP1 capsid amino acid sequences using a technique described herein (e.g., ClustalW) or known to one of skill in the art. In a specific embodiment, a VP1 capsid protein has structural homology with VP1 capsid protein of No. 0 in an AAV clade in any one of Table 2 if there is at least about 99% identity between the VP1 capsid amino acid sequences using a technique described herein (e.g., ClustalW) or known to one of skill in the art. In specific embodiments, the VP1 capsid protein with structural homology to a VP1 capsid protein of No. 0 in an AAV clade in any one of Table 2 is not a known AAV.

[0166] In specific embodiments, VP1 capsid proteins with about 90% to 99% identity to a VP1 capsid protein in any one of Table 2 using a technique described herein (e.g., ClustalW) or known to one of skill in the art are not encompassed by the present disclosure if the VP1 AAV capsid protein was known in the art, such as AAV VP1 sequences disclosed in any one of Table 2 with a prefix other than “BCD”, or VP2 and VP3 capsid proteins derived therefrom.

[0167] In specific embodiments, VP1 capsid proteins with about 90% to 99% identity to VP1 capsid protein No. 0 in any one of Table 2 using a technique described herein (e.g., ClustalW) or known to one of skill in the art are not encompassed by the present disclosure if the VP1 AAV capsid protein is one listed in Table 4 or Item A or Item B.

TABLE 2
AAV Clades, AAV Branches, and Representative Sequence in subtables 2.6-2.15
Table 2.6: Branch 2 - Clade 0

| | | | % identity to | |
|---|---|---|---|---|
| | AA | | representative | Varying amino acid residues relative |
| No. | Length | Name | sequence | to the representative sequence |
| 0 | 739aa | BCD_0160 | * | |
| | | (SEQ ID | | |
| | | NO: 28) | | |
| 1 | 739aa | BCD_0161 | 99.86% | G308E |
| 2 | 739aa | BCD_0165 | 98.11% | G42S, V118A, Q168P, N385D, V522A, |
| | | | | S527A, K549R, E559D, V563I, V569I, |
| | | | | G576A, N590G, T591S, T666A |
| 3 | 739aa | BCD_0174 | 98.51% | G42S, Q168P, V522A, S527A, K549R, |
| | | | | E559D, V563I, V569I, G576A, N590G, |
| | | | | T591S |
| 4 | 739aa | BCD_0175 | 98.24% | G42S, G49W, Q168P, F285S, V522A, |
| | | | | S527A, K549R, E559D, V563I, V569I, |
| | | | | G576A, N590G, T591S |
| 5 | 739aa | BCD_0190 | 96.89% | A24D, Q31K, H38K, N41D, E67A, K81Q, |
| | | | | E84K, Q85A, K92R, I125V, A135G, Q168P, |
| | | | | I191L, S267T, Q413S, M487T, V522T, |
| | | | | S527A, D565S, V569I, G576A, T598S, |
| | | | | I604V |
| 6 | 739aa | BCD_0192 | 96.75% | A24D, Q31K, H38K, N41D, E67A, K81Q, |
| | | | | E84K, Q85A, K92R, I125V, A135G, Q168P, |
| | | | | I191L, S267T, Q413S, T462A, M487T, |
| | | | | V522T, S527A, D565S, V569I, G576A, |
| | | | | T598S, I604V |
| 7 | 739aa | BCD_0274 | 97.56% | N41D, G42S, Q168P, H258R, F316S, |
| | | | | Y355C, S473P, V522A, S527A, K549Q, |
| | | | | E559D, V563I, D565S, V569I, G576A, |
| | | | | N590G, T591S, T598S |
| 8 | 739aa | BCD_0275 | 97.97% | Q31K, G42S, Q101R, Q168P, V522A, |
| | | | | S527A, K549Q, E559D, V563I, D565S, |
| | | | | V569I, G576A, N590G, T591S, T598S |
| 9 | 739aa | BCD_0276 | 97.83% | Q31K, G42S, Q168P, Q193P, V522A, |
| | | | | S527A, K549Q, E559D, V563I, D565S, |
| | | | | V569I, G576A, N590G, T591S, T598S, |
| | | | | S668P |
| 10 | 739aa | BCD_0277 | 98.11% | Q31K, G42S, Q168P, V522A, S527A, |
| | | | | K549Q, E559D, V563I, D565S, V569I, |
| | | | | G576A, N590G, T591S, T598S |
| 11 | 739aa | BCD_0278 | 97.16% | Q31K, G42S, P140L, Q168P, N288D, |
| | | | | V323A, D371G, V522A, S527A, K549Q, |
| | | | | E559D, V563I, D565S, V569I, G576A, |
| | | | | N590G, T591S, T598S, Q618R, P634T, |
| | | | | Y734C |
| 12 | 739aa | BCD_0279 | 97.70% | Q31K, G42S, S109F, L126P, Q168P |
| | | | | F401S, V522A, S527A, K549Q, E559D, |
| | | | | V563I, D565S, V569I, G576A, N590G, |
| | | | | T591S, T598S |
| 13 | 739aa | BCD_0280 | 97.97% | G42S, Q168P, Q169R, P253H, V522A, |
| | | | | S527A, K549Q, E559D, V563I, D565S, |
| | | | | V569I, G576A, S589A, N590S, T591N |
| 14 | 739aa | BCD_0281 | 97.70% | G42S, Q168P, T280A, V326A, S389P, |
| | | | | V522A, S527A, F547S, K549Q, E559D, |
| | | | | V563I, D565S, V569I, G576A, S589A, |
| | | | | N590S, T591N |
| 15 | 739aa | BCD_0282 | 97.97% | G42S, R103H, Q168P, V522A, S527A, |
| | | | | K549Q, E559D, V563I, D565S, V569I, |
| | | | | G576A, L587P, S589A, N590S, T591N |
| 16 | 739aa | BCD_0283 | 97.97% | G42S, K51E, Q168P, V522A, S527A, |
| | | | | K549Q, E559D, V563I, D565S, V569I, |
| | | | | G576A, S589A, N590S, T591N, K644E, |
| 17 | 739aa | BCD_0284 | 98.24% | G42S, Q168P, V522A, S527A, K549Q, |
| | | | | E559D, V563I, D565S, V569I, G576A, |
| | | | | S589A, N590S, T591N |
| 18 | 739aa | BCD_0285 | 97.70% | G42S, Q168P, L314H, L465P, V522A, |
| | | | | S527A, K549Q, T553A, E559D, V563I, |
| | | | | D565S, V569I, G576A, S589A, N590S, |
| | | | | T591N, F665S |
| 19 | 739aa | BCD_0286 | 98.51% | Q168P, V522A, S527A, K549Q, E559D, |
| | | | | V563I, D565S, V569I, G576A, N590S, |
| | | | | T598S |
| 20 | 739aa | BCD_0287 | 98.11% | Q168P, I259V, S265G, V522A, S527A, |
| | | | | K549Q, E559D, V563I, D565S, V569I, |
| | | | | G576A, N590S, T598S, V718A |
| 21 | 739aa | BCD_0288 | 98.24% | Q168P, V522A, S527A, K549Q, E559D, |
| | | | | V563I, D565S, V569I, G576A, N590S, |
| | | | | T598S, T655A, P700L |
| 22 | 739aa | BCD_0289 | 98.24% | T149A, Q168P, V522A, S527A, K549Q, |
| | | | | E559D, N560T, V563I, D565S, V569I, |
| | | | | G576A, N590S, T598S |
| 23 | 739aa | BCD_0290 | 98.11% | Q168P, D240G, N500S, V522A, S527A, |
| | | | | K549Q, E559D, V563I, D565S, V569I, |
| | | | | G576A, N590S, T598S, Q703R |
| 24 | 739aa | BCD_0291 | 97.97% | G18C, Q168P, K312E, I318V, S425G, |
| | | | | V522A, S527A, K549Q, E559D, V563I, |
| | | | | D565S, V569I, G576A, N590S, T598S |
| 25 | 739aa | BCD_0292 | 98.51% | Q168P, V522A, S527A, K549Q, E559D, |
| | | | | V563I, D565S, V569I, G576A, N590S, |
| | | | | T598S |
| 26 | 739aa | BCD_0293 | 98.11% | K61E, Q168P, L353P, V522A, S527A, |
| | | | | K549Q, E559D, V563I, D565S, V569I, |
| | | | | G576A, N590S, T598S, K692E |
| 27 | 739aa | BCD_0294 | 98.24% | F56L, Q168P, K312E, V522A, S527A, |
| | | | | K549Q, E559D, V563I, D565S, V569I, |
| | | | | G576A, N590S, T598S |
| 28 | 739aa | BCD_0295 | 98.11% | V118A, P150R, Q168P, V522A, S527A, |
| | | | | K549Q, E559D, V563I, D565S, V569I, |
| | | | | G576A, N590S, T598S, M638V |
| 29 | 739aa | BCD_0296 | 97.83% | Q31K, G42S, Q152R, Q168P, V522A, |
| | | | | S527A, G543E, K549Q, E559D, V563I, |
| | | | | D565S, V569I, G576A, N590G, T591S, |
| | | | | T598S |
| 30 | 739aa | BCD_0297 | 97.97% | Q31K, G42S, Q168P, N204S, V522A, |
| | | | | S527A, K549Q, E559D, V563I, D565S, |
| | | | | V569I, G576A, N590G, T591S, T598S |
| 31 | 739aa | BCD_0298 | 98.11% | Q168P, H258R, Q362R, V522A, S527A, |
| | | | | K549Q, E559D, V563I, D565S, V569I, |
| | | | | G576A, N590S, T598S, F716S |
| 32 | 739aa | BCD_0299 | 98.78% | K142R, R407G, K549Q, E559D, V563I, |
| | | | | G576A, N590G, T591S, F670S |
| 33 | 739aa | BCD_0300 | 98.78% | R20C, S527P, K549Q, E559D, V563I, |
| | | | | G576A, E578G, N590G, T591S |
| 34 | 739aa | BCD_0301 | 98.78% | Y52H, E67K, F538L, K549Q, E559D, |
| | | | | V563I, G576A, N590G, T591S |
| 35 | 739aa | BCD_0446 | 96.08% | A24D, Q31K, H38K, N41D, E67A, K81Q, |
| | | | | E84K, Q85A, K92R, I125V, A135G, Q168P, |
| | | | | I191L, S267T, Q413S, M487T, V522T, |
| | | | | S527A, N560H, D565S, V569I, G576A, |
| | | | | N590S, T591A, T592A, N593G, T595Q, |
| | | | | E597Q, I604V |
| 36 | 736aa | BCD_0454 | 91.30% | AA24D, Q31K, H38K, N41D, D60N, K61R, |
| | | | | E67A, K81Q, E84K, Q85A, K92R, I125V, |
| | | | | L129F, A135G, L146V, K148Q, T149S, |
| | | | | N151Q, Q152E, T154D, D155S, T156S, |
| | | | | Q157S, A158G, A159I, 161-162insKSG, |
| | | | | T162Q, Q168L, Q169N, G170F, E171G, |
| | | | | S173T, 177-179delARR, Q180E, L181S, |
| | | | | D182V, F183P, 187-189delPAA, I191L, |
| | | | | Q193E, A197T, S199A, P200A, S203P, |
| | | | | N204T, G212A, D217N, Q219E, E266D, |
| | | | | S267T, Q413S, R463K, M487T, V522T, |
| | | | | S527A, N551D, D565S, V569I, G576A, |
| | | | | T591A, T598S, I604V, D719N |
| 37 | 739aa | BCD_0455 | 97.02% | A24N, Q31K, H38K, E67A, K81Q, E84K, |
| | | | | Q85A, K92R, I125V, A135G, Q168P, I191L, |
| | | | | S267T, Q413S, M487T, V522T, S527A, |
| | | | | D565S, V569I, G576A, T598S, I604V |
| 38 | 739aa | BMN_0261 | 97.56% | D40G, G42S, P55L, N88D, Q168P, D184G, |
| | | | | S199P, I321V, V522A, S527A, K549Q, |
| | | | | E559D, D565S, V569I, G576A, S589A, |
| | | | | N590S, T591N |
| 39 | 739aa | BMN_0262 | 97.56% | G42S, F100L, Q168P, S199P, C233R, |
| | | | | V522A, S527A, K549Q, E559D, V563I, |
| | | | | D565S, V569I, G576A, S589A, N590S, |
| | | | | T591N, N601S, S695G |
| 40 | 739aa | BMN_0263 | 97.83% | G42S, K143R, Q168P, Y444C, V522A, |
| | | | | S527A, K549Q, E559D, V563I, D565S, |
| | | | | V569I, G576A, S589A, N590S, T591N, |
| | | | | N694D |
| 41 | 739aa | BMN_0264 | 97.83% | G42S, Q168P, E171G, Q352L, V522A, |
| | | | | S527A, K549Q, E559D, V563I, D565S, |
| | | | | V569I, G576A, S589A, N590S, T591N, |
| | | | | N694D |
| 42 | 739aa | BMN_0265 | 99.19% | G42S, N113I, Q168P, S527A, G576A, |
| | | | | V718A |
| 43 | 739aa | BMN_0266 | 97.43% | G42S, A135V, Q168P, V522A, S527A, |
| | | | | G543R, K549Q, E559D, V563I, D565S, |
| | | | | V569I, G576A, S589A, N590S, T591N, |
| | | | | N593D, A623V, I674T, E689G |
| 44 | 739aa | BMN_0267 | 97.83% | G42S, D69Y, L126P, Q168P, S393P, |
| | | | | V522A, S527A, K549Q, E559D, V563I, |
| | | | | D565S, V569I, G576A, S589A, N590S, |
| | | | | T591N |
| 45 | 739aa | BMN_0268 | 97.83% | G42S, K137E, Q168P, I329T, M437I, |
| | | | | V522A, S527A, K549Q, E559D, V563I, |
| | | | | D565S, V569I, G576A, S589A, N590S, |
| | | | | T591N |
| 46 | 739aa | BMN_0269 | 97.83% | E21G, G42S, Y90C, Q168P, V522A, S527A, |
| | | | | K549Q, E559D, V563I, D565S, V569I, |
| | | | | G576A, S589A, N590S, T591N, I621T |
| 47 | 739aa | BMN_0270 | 98.11% | G42S, Q168P, N411S, V522A, S527A, |
| | | | | K549Q, E559D, V563I, D565S, V569I, |
| | | | | G576A, S589A, N590S, T591N |
| 48 | 739aa | BMN_0271 | 99.19% | G42S, E67G, Q168P, S527A, G576A, P729L |
| 49 | 739aa | BMN_0272 | 99.46% | G42S, Q168P, S527A, G576A |
| 50 | 739aa | BMN_0273 | 99.19% | G42S, Q168P, N500D, S527A, G576A, |
| | | | | V609A |

TABLE 2.7
Branch 2 - Clade 1

| | | | % identity to | |
|---|---|---|---|---|
| | AA | | representative | Varying amino acid residues relative |
| No. | Length | Name | sequence | to the representative sequence |
| 0 | 738aa | AAV-10 | * | |
| | | (SEQ ID | | |
| | | NO: 10) | | |
| 1 | 738aa | AAV-8 | 93.36% | D24A, K84Q, A135G, K169R, E179D, |
| | | | | I189L, G195A, L199V, S201P, G202N, |
| | | | | S269A, E413Q, S415T, S453T, Q458A, |
| | | | | G459N, Q462T, L464G, A468G, A471N, |
| | | | | N472T, S474A, A475N, L495T, S496G, |
| | | | | G507A, A508G, D517N, V520A, V524I, |
| | | | | S540N, V542I, M544I, G549N, G551A, |
| | | | | V555A, S559D, Q578E, V581I, A589Q, |
| | | | | G592A, I594Q, V595I, N597T, S665N, |
| | | | | A667S, A670N, N712S, T722V |
| 2 | 736aa | BCD_0125 | 90.62% | D24N, D41H, A67E, A135G, P148Q, |
| | | | | 152delR, S153E, T158S, K163T, E179D, |
| | | | | G195A, G202N, A206S, S224N, R313K, |
| | | | | S315N, Q328T, I343V, V390L, E413Q, |
| | | | | S449V, 453delS, G455T, Q458G, Q462T, |
| | | | | L464A, A468G, A471S, N472T, S474A, |
| | | | | A475N, K478R, L481V, L495T, S496N, |
| | | | | T509A, Y511F, H512K, V520M, T528S, |
| | | | | E534D, M544I, G551N, R552K, N554G, |
| | | | | V555A, S559Q, M561L, L562I, S564D, |
| | | | | T570A, Q578E, V581S, D584I, L586N, |
| | | | | Q588N, N590S, G592Q, P593A, I594Q, |
| | | | | V595T, N597L, N599H, S600N, A603V, |
| | | | | L604I, T662L, S665N, Q666E, A670N, |
| | | | | T722V |
| 3 | 738aa | BCD_0126 | 97.29% | D24N, D41H, A67E, E134S, A135P, |
| | | | | A136V, E179D, S315N, T417Q, Q458A, |
| | | | | A471N, C485M, R552K, S559R, A589Q, |
| | | | | T591V, G592A, N597A, E720D, T722N |
| 4 | 736aa | BCD_0127 | 96.06% | D24N, D41N, K84Q, E134S, A135P, |
| | | | | A136V |
| | | | | E179D, 263delN, G264S, T265Q, 267delG, |
| | | | | S269A, T274H, Y275F, K312R, R313K, |
| | | | | S315R, T417Q, Q458T, Q462K, A471N, |
| | | | | L495T, S496N, R552K, Q578E, A589Q, |
| | | | | T591V, G592A, N597A, S665N |
| 5 | 736aa | BCD_0146 | 93.75% | D24N, D41T, K51T, K84Q, E134S, |
| | | | | A135P, A136V, E179D, 263delN, G264S, |
| | | | | T265Q, 267delG, S269A, T274H, Y275F, |
| | | | | K312R, |
| | | | | R313K, S315R, T417Q, Q458T, G459R, |
| | | | | Q462K, A471N, L495T, S496N, R552K, |
| | | | | Q578E, A589Q, T591V, G592A, N597A |
| | | | | N630H, D659N, T662A, T663E, Q666A, |
| | | | | A667T, L669F, I701V, Y708A, T711A, |
| | | | | A716T, N718D, T719N, E720N, T722L, |
| | | | | S724T |
| 6 | 738aa | BCD_0177 | 97.70% | K84Q, E134S, A135P, A136V, E179D, |
| | | | | S315N, T417Q, Q458T, A471N, L495T, |
| | | | | S496N, R552K, A589Q, T591A, G592A, |
| | | | | N597A, S665N |
| 7 | 736aa | BCD_0180 | 90.90% | D41N, A135G, P148Q, 152delR, S153E, |
| | | | | T158S, K163T, E179D, I189L, G195A, |
| | | | | S201P, G202N, A206S, S224N, S315N, |
| | | | | Q328T, I343V, I375V, V390L, E413Q, |
| | | | | S449V, 453delS, G455T, Q458G, Q462T |
| | | | | L464A, A471S, N472S, S474A, A475N, |
| | | | | K478R, L481V, C485S, L495T, S496N, |
| | | | | T509A, Y511F, H512K, V520M, T528S, |
| | | | | E533D, E534D, M544I, R552N, N554G, |
| | | | | S559Q, M561L, L562I, S564D, T570A, |
| | | | | Q578E, V581A, D584I, L586N, Q588A |
| | | | | G592Q, P593A, I594Q, V595T, N597L, |
| | | | | N599H, S600N, A603V, L604I, T662L, |
| | | | | S665N, A670N, N712S, T722V |
| 8 | 738aa | BCD_0181 | 98.10% | E134T, A135P, E179D, S315N, E413T, |
| | | | | I441V, Q458A, A471N, R552K, A589Q, |
| | | | | T591A, G592A, N597A, E720D |
| 9 | 736aa | BCD_0182 | 91.17% | E74Q, A135G, P148Q, 152delR, S153E, |
| | | | | T158S, K163T, E179D, I189L, G195A, |
| | | | | S201P, G202N, A206S, S224N, S315N, |
| | | | | Q328T, I343V, I375V, V390L, E413Q, |
| | | | | S449V, 453delS, G455T, Q458G, Q462T, |
| | | | | L464A, A471S, N472S, S474A, A475N, |
| | | | | K478R, L481V, L495T, S496N, T509A, |
| | | | | Y511F, H512K, V520M, T528S, E533D, |
| | | | | E534D, M544I, R552N, N554G, S559Q, |
| | | | | M561L, L562I, S564D, T570A, Q578E, |
| | | | | V581A, D584I, L586N, Q588A, G592Q, |
| | | | | P593A, I594Q, V595T, N597L, N599H, |
| | | | | S600N, A603V, L604I, T662L, S665N, |
| | | | | A670N, T722V |
| 10 | 736aa | BCD_0185 | 91.44% | A135G, P148Q, 152delR, S153E, T158S, |
| | | | | K163T, E179D, I189L, G195A, S201P, |
| | | | | G202N, A206S, S224N, S315N, Q328T, |
| | | | | I343V, I375V, V390L, E413Q, S449V, |
| | | | | 453delS, G455T, Q458G, Q462T, L464A, |
| | | | | A471S, N472S, S474A, A475N, K478R, |
| | | | | L481V, L495T, S496N, T509A, Y511F, |
| | | | | H512K, V520M, T528S, E534D, M544I, |
| | | | | R552N, N554G, S559Q, M561L, L562I, |
| | | | | S564D, T570A, Q578E, V581A, D584I, |
| | | | | L586N, Q588A, G592Q, P593A, I594Q, |
| | | | | V595T, N597L, N599H, S600N, A603V, |
| | | | | L604I, T662L, S665N, A670N, T722V |
| 11 | 738aa | BCD_0186 | 96.75% | A135G, K169R, T177I, E179D, I189L, |
| | | | | G195A, G198S, L199V, E413S, Q458A, |
| | | | | A471S, K478R, H529N, E534D, V542I, |
| | | | | R552K, S559N, A589Q, G592A, N597A, |
| | | | | T663A, S665N, A670N, T722V |
| 12 | 738aa | BCD_0187 | 96.88% | A135G, K169R, E179D, I189L, G195A, |
| | | | | G198S, L199V, E413S, Q458A, A471S, |
| | | | | K478R, H529N, E534D, V542I, R552K, |
| | | | | S559N, A589Q, G592A, N597A, T663A, |
| | | | | S665N, A670N, T722V |
| 13 | 734aa | BCD_0193 | 90.60% | D41H, A67E, V125I, A135G, P148Q, |
| | | | | 152delR, S153E, T158S, K163T, E179D, |
| | | | | G195A, G202N, A206S, S224N, R313K, |
| | | | | S315N, Q328T, I343V, I375V, V390L, |
| | | | | E413Q, S449V, 453delS, G455T, Q458G, |
| | | | | Q462T, L464A, A468G, A471S, N472T, |
| | | | | S474A, A475N, K478R, L481V, L495Q, |
| | | | | S496N, T509A, Y511F, H512K, V520M, |
| | | | | T528S, E534D, M544I, G551N, R552K, |
| | | | | N554G, V555A, S559Q, M561L, L562I, |
| | | | | S564D, T570A, Q578E, D584I, L586Q, |
| | | | | Q588N, G592Q, P593A, I594Q, V595T, |
| | | | | N597A, N599H, S600N, A603V, L604I, |
| | | | | T662L, S665T, Q666E, A670N, N712S, |
| | | | | T722V, 738delL |
| 14 | 736aa | BCD_0195 | 90.08% | D41H, A67E, Q105K, V125I, A135G, |
| | | | | P148Q, 152delR, S153E, T158S, K163T, |
| | | | | R171K, L172F, E179D, S180P, G195A, |
| | | | | G202N, A206S, S224N, R313K, S315N, |
| | | | | Q328T, I343V, I375V, V390L, E413Q, |
| | | | | S449V, 453delS, G455T, Q458G, Q462T, |
| | | | | L464A, A468G, A471S, N472T, S474A, |
| | | | | A475N, K478R, L481V, L495Q, S496N, |
| | | | | T509A, Y511F, H512K, V520M, T528S, |
| | | | | E534D, M544I, G551N, R552K, N554G, |
| | | | | V555A, S559Q, M561L, L562I, S564D, |
| | | | | T570A, Q578E, D584I, L586Q, Q588N, |
| | | | | G592Q, P593A, I594Q, V595T, N597A, |
| | | | | N599H, S600N, A603V, L604I, T662L, |
| | | | | S665T, Q666E, A670N, N712S, T722V |
| 15 | 738aa | BCD_0197 | 97.83% | E17K, D41N, E134S, A135P, A136V, |
| | | | | E179D, S315N, T417N, Q458A, A471N, |
| | | | | R552K, A589Q, T591A, G592A, N597A, |
| | | | | S665N |
| 16 | 731aa | BCD_0198 | 94.12% | D24A, K31Q, A67E, K77R, K84Q, |
| | | | | A135G, 148-153delPSPQRS, T158S, |
| | | | | K163T, E179D, S180A, I189L, G190S, |
| | | | | S224N, S225A, T270S, R313K, S315N, |
| | | | | I343V, E413T, 453delS, G455N, Q458N, |
| | | | | G459A, Q462T, S466A, A471Q, L495V, |
| | | | | A504T, R552K, D556E, S558Q, S559N, |
| | | | | A589T, T591S, G592A, N597A, T662V, |
| | | | | T663N, S665T, Q666D, T711A, T719A, |
| | | | | E720D, T722V |
| 17 | 736aa | BCD_0386 | 90.49% | A135G, P148Q, 152delR, S153E, T158S, |
| | | | | K163T, E179D, I189L, G195A, L199V, |
| | | | | G202N, A206S, S224N, G264S, |
| | | | | T270S, S315N, Q328D, E330N, T332V, |
| | | | | I343V, N385D, E413Q, Y447F, 453delS, |
| | | | | G455T, Q458A, Q462T, L464Q, A471S, |
| | | | | N472S, S474A, A475N, K478R, L481V, |
| | | | | L495V, S496T, N502E, T506P, V520M, |
| | | | | T528S, D531E, D532G, E534D, S539L, |
| | | | | M544I, A550T, Y557A, S558D, S559K, |
| | | | | L562I, S564N, Q578E, V581A, D584T, |
| | | | | L586H, Q588S, N590Q, T591A, G592Q, |
| | | | | P593A, I594Q, V595T, N597L, N599H, |
| | | | | S600N, A603V, S665N, A670N, T711N, |
| | | | | D714E, T722V, Y733F |
| 18 | 738aa | BCD_0448 | 91.19% | D41N, A135G, V146L, P148K, S149T, |
| | | | | 151delQ, R152N, S153Q, 155-157delDSS, |
| | | | | G159D, I160T, G161Q, K162A, K163A, |
| | | | | Q166T, L172P, N173Q, F174G, G175E, |
| | | | | T177S, E179D, E181A, S182R, V183R, |
| | | | | P184Q, 185-186insL, 186-187insFD, |
| | | | | I189A, 190-191insAPL, E191Q, G195A, |
| | | | | G198P, L199V, G202N, A206S, A210G, |
| | | | | N215D, E217Q, S224N, S225A, 263delN, |
| | | | | G264S, T265Q, 267delG, S269A, T274H, |
| | | | | Y275F, K312R, R313K, S315R, T417Q, |
| | | | | Q458T, Q462K, A471N, L495T, S496N, |
| | | | | R552K, Q578E, A589Q, T591V, G592A, |
| | | | | N597A, S665N |
| 19 | 738aa | BCD_0449 | 97.29% | D24N, D41H, A67E, E134S, A135P, |
| | | | | A136V, E179D, S315N, T417Q, Q458A, |
| | | | | A471N, C485M, R552K, S559R, A589Q, |
| | | | | T591V, G592A, N597A, E720D, T722N |
| 20 | 738aa | BCD_0450 | 97.29% | D24N, D41H, A67E, E134S, A135P, |
| | | | | A136V, E179D, S315N, T417Q, Q458A, |
| | | | | A471N, C485M, R552K, D556A, A589Q, |
| | | | | T591V, G592A, N597A, E720D, T722N |
| 21 | 738aa | BCD_0486 | 93.36% | D24A, D41N, K84Q, A135G, Q165P, |
| | | | | K169R, E179D, V183A, I189L, G195A, |
| | | | | L199V, G202N, S269A, S315N, E413Q, |
| | | | | S453T, Q458A, G459N, Q462T, L464G, |
| | | | | A468G, A471N, N472T, S474A, A475N, |
| | | | | L495T, S496G, G507A, A508G, D517N, |
| | | | | V520A, V524I, S540N, V542I, M544I, |
| | | | | G549N, G551A, V555A, S559D, |
| | | | | Q578E, V581I, A589Q, G592A, I594Q, |
| | | | | V595T, N597T, S665N, A670N, T722V |
| 22 | 738aa | BCD_0487 | 93.50% | D24A, K84Q, A135G, Q165P, K169R, |
| | | | | E179D, V183A, I189L, G195A, L199V, |
| | | | | G202N, S269A, S315N, E413Q, S453T, |
| | | | | Q458A, G459N, Q462T, L464G, A468G, |
| | | | | A471N, N472T, S474A, A475N, L495T, |
| | | | | S496G, G507A, A508G, D517N, V520A, |
| | | | | V524I, S540N, V542I, M544I, G549N, |
| | | | | G551A, V555A, S559D, Q578E, V581I, |
| | | | | A589Q, G592A, I594Q, V595T, N597T, |
| | | | | S665N, A670N, T722V |
| 23 | 738aa | BCD_0488 | 92.28% | D24A, D41N, K84Q, A135G, Q165P, |
| | | | | K169R, E179D, V183A, I189L, G195A, |
| | | | | L199V, G202N, S269A, S315N, E413Q, |
| | | | | S453T, Q458A, G459N, Q462T, L464G, |
| | | | | A468G, A471N, N472T, S474A, A475N, |
| | | | | L495T, S496G, G507A, A508G, D517N, |
| | | | | V520A, V524I, S540N, V542I, M544I, |
| | | | | G549N, G551A, V555A, S559D, Q578E, |
| | | | | V581I, A589Q, G592A, I594Q, V595T, |
| | | | | N597T, S665N, A670N, Y707F, Y708D, |
| | | | | T711N, N712S, A716S, N718D, T719A, |
| | | | | E720Q, T722V |
| 24 | 737aa | BMN_0208 | 95.52% | D24A, K84Q, A135G, P148Q, 152delR, |
| | | | | S153E, T158S, E179D, I189L, G195A, |
| | | | | G198S, S201L, G202N, W235R, R313K, |
| | | | | P354S, E413S, Q458A, A471N, C485M, |
| | | | | A508G, H529N, E534D, R552K, A589Q, |
| | | | | G592A, N597A, G602E, T663A, S665N, |
| | | | | A670N, N718D, T722V, P726H |
| 25 | 737aa | BMN_0209 | 95.93% | D24A, K84Q, A135G, P148Q, 152delR, |
| | | | | S153E, T158S, E179D, I189L, G195A, |
| | | | | G198S, S201L, G202N, R313K, L357P, |
| | | | | E413S, Q458A, A471N, C485M, A508G, |
| | | | | H529N, E534D, R552K, A589Q, G592A, |
| | | | | N597A, L616P, T663A, S665N, A670N, |
| | | | | T722V |
| 26 | 737aa | BMN_0210 | 95.79% | D24A, K84Q, L129P, A135G, P148Q, |
| | | | | 152delR, S153E, T158S, E179D, I189L, |
| | | | | G195A, G198S, S201L, G202N, R313K, |
| | | | | S394F, E413S, Q458A, A471N, C485M, |
| | | | | A508G, H529N, E534D, R552K, A589Q, |
| | | | | G592A, N597A, T663A, S665N, A670N, |
| | | | | W687R, T722V |
| 27 | 737aa | BMN_0211 | 95.66% | D24A, K84Q, A135G, K143E, P148Q, |
| | | | | 152delR, S153E, T158S, E179D, I189L, |
| | | | | G195A, G198S, S201L, G202N, R313K, |
| | | | | E413S, Q458A, A471N, C485M, A508G, |
| | | | | H529N, E534D, G541A, R552K, A575T, |
| | | | | A589Q, G592A, N597A, T663A, S665N, |
| | | | | A670N, G721S, T722V |
| 28 | 737aa | BMN_0212 | 95.79% | D24A, L59P, K84Q, A135G, P148Q, |
| | | | | 152delR, S153E, T158S, E179D, I189L, |
| | | | | G195A, G198S, S201L, G202N, F290S, |
| | | | | R313K, E413S, Q458A, A471N, C485M, |
| | | | | A508G, H529N, E534D, R552K, K569R, |
| | | | | A589Q, G592A, N597A, T663A, S665N, |
| | | | | A670N, T722V |
| 29 | 737aa | BMN_0213 | 95.93% | D24A, K84Q, A135G, P148Q, 152delR, |
| | | | | S153E, T158S, E179D, I189L, G195A, |
| | | | | G198S, S201L, G202N, R313K, E413S, |
| | | | | Q458A, A471N, C485M, A508G, H529N, |
| | | | | E534D, F536L, R552K, I568V, A589Q, |
| | | | | G592A, N597A, T663A, S665N, A670N, |
| | | | | T722V |
| 30 | 737aa | BMN_0214 | 95.79% | D24A, K84Q, K123R, A135G, P148Q, |
| | | | | 152delR, S153E, T158S, E179D, I189L, |
| | | | | G195A, G198S, S201L, G202N, R313K, |
| | | | | H361R, E413S, Q458A, A471N, C485M, |
| | | | | A508G, H529N, E534D, R552K, A589Q, |
| | | | | G592A, N597A, T663A, S665N, A670N, |
| | | | | N718D, T722V |
| 31 | 737aa | BMN_0215 | 96.07% | D24A, K84Q, A135G, P148Q, 152delR, |
| | | | | S153E, T158S, E179D, I189L, G195A, |
| | | | | G198S, S201L, G202N, R313K, N320D, |
| | | | | E413S, Q458A, A471N, C485M, A508G, |
| | | | | H529N, E534D, R552K, A589Q, G592A, |
| | | | | N597A, T663A, S665N, A670N, T722V |
| 32 | 737aa | BMN_0216 | 95.93% | D24A, K84Q, A135G, P148Q, 152delR, |
| | | | | S153E, T158S, E179D, I189L, G195A, |
| | | | | G198S, S201L, G202N, R313K, E413S, |
| | | | | Q458A, A471N, C485M, A508G, H529N, |
| | | | | E534D, G541A, R552K, A589Q, G592A, |
| | | | | N597A, T663A, S665N, A670N, G721S, |
| | | | | T722V |
| 33 | 737aa | BMN_0217 | 96.07% | D24A, K84Q, A135G, P148Q, 152delR, |
| | | | | S153E, T158S, E179D I189L, G195A, |
| | | | | G198S, S201L, G202N, R313K, E413S, |
| | | | | Q458A, A471N, C485M, A508G, N521Y, |
| | | | | H529N, E534D, R552K, A589Q, G592A, |
| | | | | N597A, T663A, S665N, A670N, T722V |
| 34 | 737aa | BMN_0218 | 95.12% | D24A, E63G, K84Q, Q101R, A135G, |
| | | | | P148Q, 152delR, S153E, T158S, E179D, |
| | | | | I189L, G195A, G198S, S201L, G202N, |
| | | | | N273S, F290S, R313K, S387G, E413S, |
| | | | | T417I, Q458A, A471N, C485M, A508G, |
| | | | | H529N, E534D, R552K, A589Q, G592A, |
| | | | | N597A, T663A, S665N, A670N, Q690L, |
| | | | | N693S, T722V |
| 35 | 736aa | BMN_0302 | 90.35% | L53P, L126F, A135G, P148Q, 152delR, |
| | | | | S153E, T158S, K163T, E179D, I189L, |
| | | | | G195A, S201P, G202N, A206S, S224N, |
| | | | | G264S, S315N, Q328T, I343V, I375V, |
| | | | | V390L, E413Q, S449V, 453delS, G455T, |
| | | | | Q458G, Q462T, L464A, A471S, N472S, |
| | | | | S474A, A475N, K478R, L481V, C485S, |
| | | | | L495K, S496N, T509A, Y511F, H512K, |
| | | | | D517N, V520M, T528S, E534D, M544I, |
| | | | | R552N, N554G, S559Q, M561L, L562I, |
| | | | | S564D, T570A, Q578E, V581E, D584I, |
| | | | | L586D, Q588A, G592Q, P593A, I594Q, |
| | | | | V595T, N597L, N599H, S600N, A603V, |
| | | | | L604I, K643M, T662L, S665N, A670N, |
| | | | | T719S, E720D, T722V |
| 36 | 736aa | BMN_0303 | 90.22% | E102G, A135G, P148Q, 152delR, S153E, |
| | | | | T158S, K163T, E179D, I189L, G195A, |
| | | | | S201P, G202N, A206S, S224N, G264S, |
| | | | | L314P, S315N, Q328T, I343V, V345A, |
| | | | | I375V, V390L, E413Q, S449V, 453delS, |
| | | | | G455T, Q458G, Q462T, L464A, A471S, |
| | | | | N472S, S474A, A475N, K478R, L481V, |
| | | | | C485S, L495K, S496N, T509A, Y511F, |
| | | | | H512K, D517N, V520M, T528S, E534D, |
| | | | | F537S, M544I, R552N, N554G, S559Q, |
| | | | | M561L, L562I, S564D, T570A, Q578E, |
| | | | | V581E, D584I, L586D, Q588A, G592Q, |
| | | | | P593A, I594Q, V595T, N597L, N599H, |
| | | | | S600N, A603V, L604I, T662L, S665N, |
| | | | | A670N, T719S, E720D, T722V |
| 37 | 736aa | BMN_0304 | 90.49% | E102G, A135G, P148Q, 152delR, S153E, |
| | | | | T158S, K163T, E179D, I189L, G195A, |
| | | | | S201P, G202N, A206S, S224N, G264S, |
| | | | | S315N, Q328T, I343V, I375V, V390L, |
| | | | | E413Q, S449V, 453delS, G455T, Q458G, |
| | | | | Q462I, L464A, A471S, N472S, S474A, |
| | | | | A475N, K478R, L481V, C485S, L495K, |
| | | | | S496N, T509A, Y511F, H512K, D517N, |
| | | | | V520M, T528S, E534D, M544I, R552N, |
| | | | | N554G, V555M, S559Q, M561L, L562I, |
| | | | | S564D, T570A, Q578E, V581E, D584I, |
| | | | | L586D, Q588A, G592Q, P593A, I594Q, |
| | | | | V595T, N597L, N599H, S600N, A603V, |
| | | | | L604I, T662L, S665N, A670N, T719S, |
| | | | | E720D, T722V |
| 38 | 736aa | BMN_0305 | 90.35% | A135G, P148Q, 152delR, S153E, T158S |
| | | | | K163T, E179D, I189L, G195A, S201P, |
| | | | | G202N, A206S, S224N, G264S, S269G, |
| | | | | S315N, Q328T, I343V, I375V, Y380H, |
| | | | | V390L, E413Q, S449V, 453delS, G455T |
| | | | | Q458G, Q462T, L464A, A471S, N472S, |
| | | | | S474A, A475N, K478R, L481V, C485S, |
| | | | | L495K, S496D, T509A, Y511F, H512K, |
| | | | | D517N, V520M, T528S, E534D, M544I, |
| | | | | R552N, N554G, S559Q, M561L, L562I, |
| | | | | S564D, T570A, Q578E, V581E, D584V, |
| | | | | L586D, Q588A, G592Q, P593A, I594Q, |
| | | | | V595T, N597L, N599H, S600N, A603V, |
| | | | | L604I, T662L, F664L, S665N, A670N, |
| | | | | T719S, E720D, T722V |
| 39 | 736aa | BMN_0306 | 90.76% | A135G, P148Q, 152delR, S153E, T158S, |
| | | | | K163T, E179D, I189L, G195A, S201P, |
| | | | | G202N, A206S, S224N, G264S, S269G, |
| | | | | S315N, Q328T, I343V, I375V, Y380H, |
| | | | | V390L, E413Q, S449V, 453delS, G455T, |
| | | | | Q458G, Q462T, L464A, A471S, N472S, |
| | | | | S474A, A475N, K478R, L481V, C485S, |
| | | | | L495K, S496D, T509A, Y511F, H512K, |
| | | | | D517N, V520M, T528S, E534D, M544I, |
| | | | | R552N, N554G, S559Q, M561L, L562I, |
| | | | | S564D, T570A, Q578E, V581E, D584V, |
| | | | | L586D, Q588A, G592Q, P593A, I594Q, |
| | | | | V595T, N597L, N599H, S600N, A603V, |
| | | | | L604I, T662L, F664L, S665N, A670N, |
| | | | | T719S, E720D, T722V |
| 40 | 736aa | BMN_0307 | 90.49% | V118I, A135G, P148Q, 152delR, S153E, |
| | | | | T158S, K163T, E179D, I189L, G195A, |
| | | | | S201P, G202N, A206S, S224N, S225P, |
| | | | | W235R, S315N, Q328T, I343V, I375V, |
| | | | | V390L, G409S, E413Q, S449V, 453delS, |
| | | | | G455T, Q458G, Q462T, L464A, A471S, |
| | | | | N472S, S474A, A475N, K478R, L481V, |
| | | | | L495T, S496N, T509A, Y511F, H512K, |
| | | | | V520M, T528S, E533D, E534D, M544I, |
| | | | | A550T, R552N, N554G, S559Q, M561L, |
| | | | | L562I, S564D, T570A, Q578E, V581A, |
| | | | | D584I, L586N, Q588A, G592Q, P593A, |
| | | | | I594Q, V595T, N597L, N599H, S600N, |
| | | | | A603V, L604I, H644L, T662L, S665N, |
| | | | | A670N, T722V |
| 41 | 736aa | BMN_0308 | 90.90% | V118I, A135G, P148Q, 152delR, S153E, |
| | | | | S157P, T158S, K163T, E179D, I189L, |
| | | | | G195A, S201P, G202N, A206S, S224N, |
| | | | | S315N, Q328T, I343V, I375V, V390L, |
| | | | | E413Q, S449V, 453delS, G455T, Q458G, |
| | | | | Q462T, L464A, A471S, N472S, S474A, |
| | | | | A475N, K478R, L481V, L495T, S496N, |
| | | | | T509A, Y511F, H512K, V520M, T528S, |
| | | | | E533D, E534D, M544I, A550T, R552N, |
| | | | | N554G, S559Q, M561L, L562I, S564D, |
| | | | | T570A, Q578E, V581A, D584I, L586N, |
| | | | | Q588A, G592Q, P593A, I594Q, V595T, |
| | | | | N597L, N599H, S600N, A603V, L604I, |
| | | | | T662L, S665N, A670N, T722V |
| 42 | 736aa | BMN_0309 | 90.49% | V118I, K123R, A135G, P148Q, 152delR |
| | | | | S153E, T158S, K163T, E179D, I189L, |
| | | | | G195A, S201P, G202N, A206S, S224N, |
| | | | | S315N, Q328T, I343V, I375V, V390L, |
| | | | | G409S, E413Q, Y427C, S449V, 453delS, |
| | | | | G455T, Q458G, Q462T, L464A, A471G, |
| | | | | N472S, S474A, A475N K478R, L481V, |
| | | | | L495T, S496N, T509A, Y511F, H512K, |
| | | | | V520M, T528S, E533D, E534D, M544I, |
| | | | | A550T, R552N, N554G, S559Q, M561L, |
| | | | | L562I, S564D, T570A, Q578E, V581A, |
| | | | | D584I, L586N, Q588A, G592Q, P593A, |
| | | | | I594Q, V595T, N597L, N599H, S600N, |
| | | | | A603V, L604I, S634P, T662L, S665N, |
| | | | | A670N, T722V |
| 43 | 736aa | BMN_0310 | 90.35% | L47F, V118I, A135G, P148Q, 152delR, |
| | | | | S153E, T158S, K163T, Q165R, E179D, |
| | | | | I189L, G195A, S201P, G202N, A206S, |
| | | | | S224N, S266P, T280A, S315N, Q328T, |
| | | | | I343V, I375V, V390L, E413Q, S449V, |
| | | | | 453delS, G455T, Q458G, Q462T, L464A, |
| | | | | A471S, N472S, S474A, A475N, K478R, |
| | | | | L481V, L495T, S496N, T509A, Y511F, |
| | | | | H512K, V520M, T528S, E533D, E534D, |
| | | | | M544I, A550T, R552N, N554G, S559Q, |
| | | | | M561L, L562I, S564D, T570A, Q578E, |
| | | | | V581A, D584I, L586N, Q588A, G592Q, |
| | | | | P593A, I594Q, V595T, N597L, N599H, |
| | | | | S600N, A603V, L604I, L616Q, T662L, |
| | | | | S665N, A670N, T722V |
| 44 | 736aa | BMN_0311 | 90.62% | V118I, A135G, P148Q, 152delR, S153E, |
| | | | | T158S, K163T, F174S, E179D, I189L, |
| | | | | G195A, S201P, G202N, A206S, S224N |
| | | | | S315N, Q328T, I343V, H361Y, I375V, |
| | | | | V390L, E413Q, F414S, S449V, 453delS, |
| | | | | G455T, Q458G, Q462T, L464A, A471S, |
| | | | | N472S, S474, A475N, K478R, L481V, |
| | | | | L495T, S496N, T509A, Y511F, H512K, |
| | | | | V520M, T528S, E533D, E534D, M544I, |
| | | | | A550T, R552N, N554G, S559Q, M561L, |
| | | | | L562I, S564D, T570A, Q578E, V581A, |
| | | | | D584I, L586N, Q588A, G592Q, P593A, |
| | | | | I594Q, V595T, N597L, N599H, S600N, |
| | | | | A603V, L604I, T662L, S665N, A670N, |
| | | | | T722V |
| 45 | 736aa | BMN_0312 | 90.76% | P30S, A135G, A139V, P148Q, 152delR, |
| | | | | S153E, T158S, K163T, E179D, I189L, |
| | | | | G195A, S201P, G202N, A206S, S224N, |
| | | | | S315N, Q328T, I343V, H361Y, I375V, |
| | | | | V390L, E413Q, S449V, 453delS, G455T, |
| | | | | Q458G, Q462T, L464A, A471S, N472S, |
| | | | | S474A, A475N, K478R, L481V, L495T, |
| | | | | S496N, T509A, Y511F, H512K, V520M, |
| | | | | T528S, E533D, E534D, M544I, A550T, |
| | | | | R552N, N554G, S559Q, M561L, L562I, |
| | | | | S564D, T570A, Q578E, V581A, D584I, |
| | | | | L586N, Q588A, G592Q, P593A, I594Q, |
| | | | | V595T, N597L, N599H S600N, A603V, |
| | | | | L604I, T662L, S665N, A670N, T722V |
| 46 | 736aa | BMN_0313 | 90.76% | P30S, A135G, A139V, P148Q, 152delR, |
| | | | | S153E, T158S, K163T, E179D, I189L, |
| | | | | G195A, S201P, G202N, A206S, S224N, |
| | | | | S315N, Q328T, I343V, H361Y, I375V, |
| | | | | V390L, E413Q, S449V, 453delS, G455T, |
| | | | | Q458G, Q462T, L464A, A471S, N472S, |
| | | | | S474A, A475N, K478R, L481V, L495T, |
| | | | | S496N, T509A, Y511F, H512K, V520M, |
| | | | | T528S, E533D, E534D, M544I, A550T, |
| | | | | R552N, N554G, S559Q, M561L, L562I, |
| | | | | S564D, T570A, Q578E, V581A, D584I, |
| | | | | L586N, Q588A, G592Q, P593A, I594Q, |
| | | | | V595T, N597L, N599H, S600N, A603V, |
| | | | | L604I, T662L, S665N, A670N, T722V |
| 47 | 736aa | BMN_0314 | 90.62% | A135G, P148Q, 152delR, S153E, T158S, |
| | | | | K163T, E179D, S180T, I189L, G190R, |
| | | | | G195A, S201P, G202N, A206S, S224N, |
| | | | | S315N, L318P, Q328T, L339P, I343V, |
| | | | | H361R, I375V, V390L, N410D, E413Q, |
| | | | | S449V, 453delS, G455T, Q458G, Q462T, |
| | | | | L464A, A471S, N472S, S474A, A475N, |
| | | | | K478R, L481V, L495T, S496N, T509A, |
| | | | | Y511F, H512K, V520M, T528S, E534D, |
| | | | | M544I, R552N, N554G, S559Q, M561L, |
| | | | | L562I, S564D, T570A, Q578E, V581A, |
| | | | | D584I, L586N, Q588A, G592L, P593A, |
| | | | | I594Q, V595T, N597L, N599H, S600N, |
| | | | | A603V, L604I, T662L, S665N, A670N, |
| | | | | T722V |
| 48 | 736aa | BMN_0315 | 91.03% | A135G, K137N, P148Q, 152delR, S153E, |
| | | | | T158S, K163T, E179D, I189L, G190R, |
| | | | | G195A, S201P, G202N, A206S, S224N, |
| | | | | N305S, S315N, Q328T, I343V, I375V, |
| | | | | V390L, E413Q, S449V, 453delS, G455T, |
| | | | | Q458G, Q462T, L464A, A471S, N472S, |
| | | | | S474A, A475N, K478R, L481V, L495T, |
| | | | | S496N, T509A, Y511F, H512K, V520M, |
| | | | | T528S, E534D, M544I, R552N, N554G, |
| | | | | S559Q, M561L, L562I, S564D, T570A, |
| | | | | Q578E, V581A, D584I, L586N, Q588A, |
| | | | | G592Q, P593A, I594Q, V595T, N597L, |
| | | | | N599H, S600N, A603V, L604I, T662L, |
| | | | | S665N, A670N, T722V |

TABLE 2.8
Branch 2 - Clade 4

| | | | % identity to | |
|---|---|---|---|---|
| | AA | | representative | Varying amino acid residues relative to the |
| No. | Length | Name | sequence | representative sequence |
| 0 | 728aa | BCD_0360 | * | |
| | | (SEQ ID | | |
| | | NO: 91) | | |
| 1 | 726aa | AAV_po.6 | 93.94% | 263-264delTG, G265S, E326Q, N327T, |
| | | | | E328D, I373V, P460H, S461N, S485P, |
| | | | | E487Q, N490T, E492D, S494A, A498T, |
| | | | | K500R, D507N, V509A, D524E, Q538E, |
| | | | | G539D, S540A, N541E, A542K, S543N, |
| | | | | V545A, Q546V, L551I, E567G, F571L, |
| | | | | S575N, L576F, 579delG, 584-585insA, |
| | | | | T586E, R587M, Y616H, G648A, P651A, |
| | | | | Q656P, Q657A, D704E, N708D, S709N, |
| | | | | D710N |
| 2 | 726aa | BCD_0106 | 95.45% | T178A, 263-264delTG, G265S, N268S, |
| | | | | Q386H, S461N, K483T, T484V, S485P, |
| | | | | E487Q, G491A, D507N, V509A, S518T, |
| | | | | D524E, S540A, N541D, A542K, S543T, |
| | | | | V545A, Q546V, D548E, L551I, I552V, |
| | | | | T560A, F571V, S575N, T582Q, D584T, |
| | | | | T586N, R587D, N655S, Q657N, S709G |
| 3 | 726aa | BCD_0351 | 95.32% | T178A, 263-264delTG, G265S, N268S, |
| | | | | E326Q, N327T, E328D, I373V, S461T, |
| | | | | S485P, E487Q, N490T, E492D, S494A, |
| | | | | A498T, K500R, S540A, N541E, A542K, |
| | | | | S543N, V545A, Q546V, L551I, F571L, |
| | | | | G579N, N580T, T586E, G648A, P651A, |
| | | | | Q656P, Q657A, N708D, S709T, D710N, |
| | | | | V712M |
| 4 | 726aa | BCD_0353 | 95.04% | S206G, 263-264delTG, G265S, N268S, |
| | | | | E326Q, N327T, E328D, I373V, S485P, |
| | | | | E487Q, N490T, E492D, S494A, A498T, |
| | | | | K500R, Q538K, G539D, S540A, N541E, |
| | | | | A542K, S543N, V545A, Q546V, L551I, |
| | | | | F571L, 579delG, 584-585insA, T586E, |
| | | | | G648A, P651A, Q656P, Q657A, D704E, |
| | | | | N708D, S709N, D710N |
| 5 | 727aa | BCD_0354 | 92.98% | T178A, 262delQ, T263S, G264S, G265F, |
| | | | | N268T, N271D, E326D, N327T, E328D, |
| | | | | Q450N, N451G, G454A, P460H, S461T, |
| | | | | S462N, D465N, S485P, G491Q, D524N, |
| | | | | K537T, Q538P, G539N, S540A, N541A, |
| | | | | S543T, V545A, D548G, K549D, F571I, |
| | | | | T574N, S575N, L576K, N578S, G579S, |
| | | | | N580S, T581I, T582Q, D584T, R587N, |
| | | | | Y616H, R634H, G648S, D649N, T652E, |
| | | | | N655K, Q657E, A660N, S661A, N708D, |
| | | | | S709T, D710N |
| 6 | 727aa | BCD_0359 | 93.54% | I117V, T178A, A182P, 262delQ, T263S, |
| | | | | G264S, G265F, N268T, E328D, I373V, |
| | | | | Q450A, N451G, G454A, S461T, S485P, |
| | | | | G491Q, D524N, K537T, Q538P, G539N, |
| | | | | S540A, S543T, V545A, D548N, K549D, |
| | | | | F571I, T574N, S575N, L576K, N578S, |
| | | | | G579S, N580S, T581I, T582Q, D584T, |
| | | | | R587N, Y616H, R634H, G648S, D649N, |
| | | | | T652E, N655K, Q657D, A660N, S661A, |
| | | | | N708D, S709T, D710N |
| 7 | 727aa | BCD_0361 | 92.71% | I117V, T178A, A182P, 262delQ, T263S, |
| | | | | G264N, G265Y, N327T, E328D, Q450A, |
| | | | | N451G, G454A, S461T, D465N, I481V, |
| | | | | K483E, T484R, E492D, A498T, K500R, |
| | | | | V509A, K537T, Q538P, G539N, S540A, |
| | | | | N541T, V545A, Q546P, K549N, F571I, |
| | | | | T574N, S575N, L576K, N578D, G579N, |
| | | | | N580S, T582Q, D584T, T586A, R587I, |
| | | | | Y616H, R634H, G648S, D649N, T652E, |
| | | | | T653K, N655T, Q657E, A660N, S661A, |
| | | | | N708D, S709T, D710N, V712M |
| 8 | 727aa | BCD_0362 | 94.50% | 262delQ, T263S, G264Q, G265A, N268S, |
| | | | | E326D, N327T, Q450N, N451G, K483T, |
| | | | | T484V, S485P, E487Q, E492D, D507N, |
| | | | | V509A, D524H, S540A, N541E, A542K, |
| | | | | S543N, V545A, Q546I, L551I, I558V, |
| | | | | N578S, G579S, N580T, T581E, T582A, |
| | | | | D584E, T586A, Y616H, G648S, T652L, |
| | | | | Q656P, Q657A, D704E, N708D, S709N, |
| | | | | D710N |
| 9 | 727aa | BCD_0389 | 93.12% | E62D, P134L, T178A, A182P, 262delQ, |
| | | | | T263S, G264N, G265Y, N327T, Q386H, |
| | | | | S461T, D465N, I481V, K483E, T484R, |
| | | | | E492D, D507N, V509A, K537T, Q538P, |
| | | | | G539N, S540A, N541T, V545T, Q546P, |
| | | | | D548E, K549N, F571I, T574N, S575N, |
| | | | | L576K, N578D, N580S, T582Q, D584T, |
| | | | | T586A, R587I, Y616H, R634H, G648S, |
| | | | | D649N, T652E, T653K, N655T, Q657E, |
| | | | | A660N, S661A, N708D, S709T, D710N, |
| | | | | V712M |
| 10 | 727aa | BCD_0390 | 93.26% | S206G, 262delQ, T263S, G264S, G265F, |
| | | | | N268T, N271D, E326D, N327T, E328D, |
| | | | | Q450N, N451G, G454A, P460H, S461T, |
| | | | | S462N, D465N, S485P, G491Q, D524N, |
| | | | | K537T, Q538P, G539N, S540A, S543T, |
| | | | | V545A, D548N, K549D, F571I, T574N, |
| | | | | S575N, L576K, N578S, G579S, N580S, |
| | | | | T582Q, D584T, R587N, Y616H, R634H, |
| | | | | G648S, D649N, T652E, N655K, Q657E, |
| | | | | A660N, S661A, N708D, S709T, D710N |
| 11 | 728aa | BCD_0391 | 95.33% | A150V, T178A, S206G, Q262S, T263S, |
| | | | | G265S, N268T, N327T, E328D, I373V, |
| | | | | G454A, D465N, D524H, S540A, N541D, |
| | | | | A542K, S543T, V545A, Q546I, L551I, |
| | | | | I552V, T560A, S575T, N580Q, T582A, |
| | | | | R634H, G648S, D649N, T652D, Q656P, |
| | | | | Q657E, A660N, N698D, S709G |
| 12 | 727aa | BCD_0392 | 93.26% | S206G, 262delQ, T263S, G264N, G265Y, |
| | | | | N327T, E328D, Q386H, S461T, D465N, |
| | | | | I481V, K483E, T484R, E492D, A498T, |
| | | | | V509A, K537T, Q538P, G539N, S540A, |
| | | | | S543T, V545A, Q546P, D548E, K549N, |
| | | | | F571I, T574N, S575N, L576K, N578D, |
| | | | | G579S, N580S, T582Q, D584T, T586A, |
| | | | | R587I, Y616H, R634H, G648S, D649N, |
| | | | | T652E, T653K, N655T, Q657E, A660N, |
| | | | | S661A, N708D, S709T, D710N, V712M |
| 13 | 727aa | BCD_0393 | 93.81% | 262delQ, T263S, G264Q, G265A, E326D, |
| | | | | N327T, E328D, I373V, Q450N, N451G, |
| | | | | S461N, K483T, T484V, S485P, E487Q, |
| | | | | E492D, T496A, D507N, V509A, D524H, |
| | | | | S540A, N541E, A542K, S543N, V545A, |
| | | | | Q546I, L551I, N578S, G579P, N580T, |
| | | | | T581E, T582A, D584E, T586A, Y616H, |
| | | | | R634H, G648S, D649N, T652E, N655T, |
| | | | | Q657E, A660N, S661A, N708D, S709T, |
| | | | | D710N |
| 14 | 727aa | BCD_0394 | 93.67% | S206G, 262delQ, T263S, G264Q, G265A, |
| | | | | E326D, N327T, E328D, I373V, Q450N, |
| | | | | N451G, S461N, K483T, T484V, S485P, |
| | | | | E487Q, E492D, T496A, D507N, V509A, |
| | | | | D524H, S540A, N541E, A542K, S543N, |
| | | | | V545A, Q546I, L551I, N578S, G579P, |
| | | | | N580T, T581E, T582A, D584E, T586A, |
| | | | | Y616H, R634H, G648S, D649N, T652E, |
| | | | | N655T, Q657E, A660N, S661A, N708D, |
| | | | | S709T, D710N |
| 15 | 727aa | BCD_0395 | 93.54% | T178A, 262delQ, T263S, G264Q, G265A, |
| | | | | E326D, N327T, E328D, I373V, Q450N, |
| | | | | N451G, S461N, K483T, T484V, S485P, |
| | | | | E487Q, E492D, T496A, D507N, V509A, |
| | | | | D524H, S540A, N541E, A542K, S543N, |
| | | | | V545A, Q546I, L551I, A573S, N578S, |
| | | | | G579P, N580T, T581E, T582A, D584E, |
| | | | | T586A, Y616H, R634H, G648S, D649N, |
| | | | | T652E, N655T, Q657E, A660N, S661A, |
| | | | | N708D, S709T, D710N |
| 16 | 727aa | BCD_0396 | 93.95% | S206G, 262delQ, T263S, G264S, G265F, |
| | | | | N268T, E328D, I373V, Q450A, N451G, |
| | | | | G454A, S461T, S485P, G491Q, D524N, |
| | | | | K537T, Q538P, G539N, S540A, S543T, |
| | | | | V545A, D548N, K549D, F571I, T574N, |
| | | | | S575N, L576K, N578S, G579S, N580S, |
| | | | | T582Q, D584T, R587N, Y616H, R634H, |
| | | | | G648S, D649N, T652E, N655K, Q657E, |
| | | | | A660N, S661A, N708D, S709T, D710N |
| 17 | 727aa | BCD_0413 | 93.54% | A181V, 262delQ, T263G, G264N, G265Y, |
| | | | | E326D, N327T, E328D, Q450N, N451G, |
| | | | | G454A, P460H, S461T, S462N, D465N, |
| | | | | S485P, G491Q, D524N, K537T, Q538S, |
| | | | | G539N, S540A, S543T, V545A, D548N, |
| | | | | K549D, F571I, T574N, S575N, L576K, |
| | | | | N578S, G579S, N580S, T582Q, D584T, |
| | | | | R587N, Y616H, R634H, G648S, D649N, |
| | | | | T652E, Q656P, Q657A, A660N, S661A, |
| | | | | N708D, S709T, D710N |
| 18 | 726aa | BCD_0414 | 95.18% | A133E, S206G, 263-264delTG, G265S, |
| | | | | E326Q, N327T, E328D, I373V, S485P, |
| | | | | E487Q, N490T, E492D, S494A, A498T, |
| | | | | K500R, Q538K, G539D, S540A, N541E, |
| | | | | A542K, S543N, V545A, Q546V, L551I, |
| | | | | F571L, G579N, N580T, T586E, G648A, |
| | | | | P651A, Q656P, Q657A, D704E, N708D, |
| | | | | S709N, D710N |
| 19 | 726aa | BCD_0415 | 95.18% | S206G, 263-264delTG, G265S, N268T, |
| | | | | N327T, G454A, S461N, N469K, E487Q, |
| | | | | G491N, S494A, D507N, V509A, S518T, |
| | | | | D524H, S540A, N541E, A542K, S543N, |
| | | | | V545A, Q546I, L551I, T560A, A565S, |
| | | | | F571V, S575N, T582Q, D584T, T586N, |
| | | | | R587D, Y616H, R634H, G648S, T652L, |
| | | | | N698D, S709G |
| 20 | 726aa | BCD_0443 | 94.35% | I145V, S153G, K156S, Q163H, T178A, |
| | | | | S206G, 263-264delTG, G265S, N268S, |
| | | | | E326Q, N327T, E328D, I373V, S462N, |
| | | | | S485P, E487Q, N490T, E492D, S494A, |
| | | | | A498T, K500R, G539D, S540A, N541E, |
| | | | | A542K, S543N, V545A, Q546V, L551I, |
| | | | | F571L, 579delG, 584-585insA, T586E, |
| | | | | G648A, P651A, Q656P, Q657A, N708D, |
| | | | | S709T, D710N, V712M |
| 21 | 726aa | BCD_0459 | 94.77% | A69E, S206G, 263-264delTG, G265S, |
| | | | | N268S, E326Q, N327T, E328D, I373V, |
| | | | | Q386H, S461T, S485P, E487Q, N490T, |
| | | | | E492D, S494A, A498T, K500R, G539D, |
| | | | | S540A, N541E, A542K, S543N, V545A, |
| | | | | Q546V, L551I, F571L, 579delG, 584- |
| | | | | 585insA, T586E, G648A, P651A, Q656P, |
| | | | | Q657A, N708D, S709T, D710N, V712M |
| 22 | 727aa | BCD_0461 | 92.71% | A69E, L113I, S206G, 262delQ, T263S, |
| | | | | G264N, G265Y, N327T, Q450A, N451G, |
| | | | | G454A, S461T, S462T, D465N, I481V, |
| | | | | K483E, T484R, E492D, A498T, K500R, |
| | | | | V509A, K537T, Q538P, G539N, S540A, |
| | | | | N541T, V545A, Q546P, K549N, F571I, |
| | | | | T574N, S575N, L576K, N578D, G579S, |
| | | | | N580S, T582Q, D584T, T586A, R587I, |
| | | | | Y616H, R634H, G648S, D649N, T652E, |
| | | | | T653K, N655T, Q657E, A660N, S661A, |
| | | | | N708D, S709T, D710N, V712M |
| 23 | 727aa | BCD_0462 | 93.12% | A69E, S206G, 262delQ, T263S, G264S, |
| | | | | G265F, N268T, N271D, E326D, N327T, |
| | | | | E328D, Q450N, N451G, G454A, P460H, |
| | | | | S461T, S462N, D465N, S485P, G491Q, |
| | | | | D524N, K537T, Q538P, G539N, S540A, |
| | | | | S543T, V545A, D548N, K549D, F571I, |
| | | | | T574N, S575N, L576K, N578S, G579S, |
| | | | | N580S, T582Q, D584T, R587N, Y616H, |
| | | | | R634H, G648S, D649N, T652E, N655K, |
| | | | | Q657E, A660N, S661A, N708D, S709T, |
| | | | | D710N |
| 24 | 726aa | BCD_0466 | 94.77% | A69E, S206G, 263-264delTG, G265S, |
| | | | | I373V, Q386H, G454A, S461N, E487Q, |
| | | | | G491N, S494A, D507N, V509A, D524H, |
| | | | | S540A, N541D, A542K, S543T, V545A, |
| | | | | Q546I, L551I, I552V, T560A, F571V, |
| | | | | S575N, T582Q, D584T, T586N, R587D, |
| | | | | Y616H, R634H, G648S, D649N, T652D, |
| | | | | Q656P, Q657E, A660N, N698D, S709G |
| 25 | 727aa | BCD_0467 | 93.12% | A69E, S206G, 262delQ, T263S, G264S, |
| | | | | G265F, N268T, N271D, I373V, Q386H, |
| | | | | Q450N, N451G, G454A, P460H, S461T, |
| | | | | S462N, D465N, S485P, G491Q, K537T, |
| | | | | G539N, S540A, N541A, S543T, V545A, |
| | | | | Q546L, D548N, K549D, F571I, T574N, |
| | | | | S575N, L576K, N578S, G579S, N580S, |
| | | | | T581I, T582Q, D584T, R587N, Y616H, |
| | | | | R634H, G648S, D649N, T652E, N655K, |
| | | | | Q657E, A660N, S661A, N708D, S709T, |
| | | | | D710N |
| 26 | 726aa | BCD_0468 | 94.49% | A69E, S206G, 263-264delTG, G265S, |
| | | | | I373V, Q386H, G454A, S461N, S485P, |
| | | | | G491Q, D524N, K537T, Q538P, G539N, |
| | | | | S540A, S543T, V545A, D548N, K549D, |
| | | | | F571I, T574N, S575N, L576K, N578S, |
| | | | | G579S, N580S, T582Q, D584T, R587N, |
| | | | | Y616H, R634H, G648S, D649N, T652E, |
| | | | | N655K, Q657E, A660N, S661A, N708D, |
| | | | | S709T, D710N |
| 27 | 727aa | BCD_0492 | 92.98% | K104A, A182P, S206G, 262delQ, |
| | | | | T263S, G264S, G265F, N268T, N271D, |
| | | | | E326D, N327T, E328D, Q450N, N451G, |
| | | | | G454A, P460H, S461T, S462N, D465N, |
| | | | | S485P, G491Q, D524N, K537T, Q538P, |
| | | | | G539N, S540A, S543T, V545T, D548N, |
| | | | | K549D, F571I, T574N, S575N, L576K, |
| | | | | N578S, G579S, N580S, T582Q, D584T, |
| | | | | R587N, Y616H, R634H, G648S, D649N, |
| | | | | T652E, N655K, Q657D, A660N, S661A, |
| | | | | N708D, S709T, D710N |
| 28 | 728aa | BCD_0505 | 95.60% | S206G, Q262S, T263S, G265S, N268T, |
| | | | | N327T, E328D, I373V, G454A, D465N, |
| | | | | D524H, S540A, N541D, A542K, S543T, |
| | | | | V545A, Q546I, L551I, I552V, T560A, |
| | | | | S575T, N580Q, T582A, R634H, G648S, |
| | | | | D649N, T652D, Q656P, Q657E, A660N, |
| | | | | N698D, S709G |
| 29 | 727aa | BCD_0506 | 94.36% | A182P, 262delQ, T263S, G264Q, G265A, |
| | | | | N268S, E326D, N327T, Q450N, N451G, |
| | | | | S461N, K483T, T484V, S485P, E487Q, |
| | | | | E492D, T496A, D507N, V509A, D524H, |
| | | | | S540A, N541E, A542K, S543N, V545A, |
| | | | | Q546I, L551I, N578S, G579P, N580T, |
| | | | | T581E, T582A, D584E, T586A, Y616H, |
| | | | | G648S, T652L, Q656P, Q657A, N708D, |
| | | | | S709N, D710N |

TABLE 2.9
Branch 2 - Clade 6

| | | | % identity to | |
|---|---|---|---|---|
| | AA | | representative | Varying amino acid residues relative to the |
| No. | Length | Name | sequence | representative sequence |
| 0 | 737aa | AAV-7 | * | |
| | | (SEQ ID | | |
| | | NO: 7) | | |
| 1 | 728aa | BCD_0120 | 91.76% | D24N, N41H, A67E, A141G, V146I, 148- |
| | | | | 152delPSPQR, R169K, R171K, S198G, |
| | | | | V199L, V204M, 264delE, T265Q, A266S, |
| | | | | S268A, T273H, Y274F, K311R, S416T, |
| | | | | D419E, N453T, P454T, G456S, 458- |
| | | | | 460delAGN, R461K, Y466H, G468A, |
| | | | | S471N, A477S, F486Y, V491L, T494N, |
| | | | | L495R, Q497S, K510T, V520T, H529N, |
| | | | | R535H, S539I, S540N, I544V, T551A, |
| | | | | N563S, R568K, P569T, I580V, 587delA, |
| | | | | A588S, N589S, A592G, 593-594insP, |
| | | | | V596T, N599S, F706Y, E707A, Q709S, |
| | | | | T710N, G711N, D713E, D717N, S718N, |
| | | | | S723T |
| 2 | 737aa | BCD_0176 | 96.47% | N41D, E134S, G135P, A136V, A141G, |
| | | | | R169K, L189I, A195G, S198G, V199L, |
| | | | | V204M, E264Q, T265S, T273V, R314N, |
| | | | | I342V, E412T, S416T, P454A, S471T, |
| | | | | Q489K, V524I, D534E, A588S, N589S, |
| | | | | E707D |
| 3 | 728aa | BCD_0178 | 91.76% | N41D, A141G, 148-152delPSPQR, R169K, |
| | | | | S198G, V199L, S201P, G202T, V204M, |
| | | | | A206S, 264delE, T265Q, A266S, S268A, |
| | | | | T273H, Y274F, K311R, S416T, D419E, |
| | | | | 453delN, P454T, G455T, T457S, 459- |
| | | | | 460delGN, Y466H, G468A, S471N, A477S, |
| | | | | F486Y, V491L, T494N, L495I, Q497S, |
| | | | | V520T, H529N, R535Q, S539I, S540N, |
| | | | | I544V, T551A, N563S, R568K, P569T, |
| | | | | I580V, 587delA, A588S, N589S, A592G, |
| | | | | 593-594insP, V596T, V597I, N599S, F706Y, |
| | | | | E707A, Q709S, T710N, G711N, D713E, |
| | | | | D717N, S718N, Q719E, S723T |
| 4 | 737aa | BCD_0179 | 96.47% | N41D, K84Q, E134S, G135P, A136V, |
| | | | | A141G, R169K, L189I, A195G, S198G, |
| | | | | V199L, V204M, E264Q, T265S, T273V, |
| | | | | R314N, I342V, E412T, S416T, P454A, |
| | | | | S471T, V524I, D534E, A588S, N589S, |
| | | | | E707D |
| 5 | 737aa | BCD_0188 | 99.73% | N41D, N460T |
| 6 | 729aa | BCD_0189 | 91.91% | D24A, N41D, A141G, 145-149delPVEPS, |
| | | | | Q151I, R152D, R169K, R171K, V204M, |
| | | | | E264S, T265S, A266S, S268A, T273H, |
| | | | | I342V, N453T, P454T, G456S, 458- |
| | | | | 460delAGN, Y466H, G468A, S471N, |
| | | | | A477S, F486Y, V491L, T494N, Q497F, |
| | | | | G507A, V520T, V524I, A525P, H529N, |
| | | | | R535Q, S539I, S540N, I544V, T551A, |
| | | | | N563S, R568K, P569T, I580V, 587delA, |
| | | | | A588S, N589S, A592G, 593-594insP, T594S, |
| | | | | V596T, V597I, N599S, F706Y, E707A, |
| | | | | Q709S, T710N, G711N, D713E, D717N, |
| | | | | S718P, Q719D, S723T |
| 7 | 730aa | BCD_0194 | 91.92% | D24A, K31Q, N41D, A67E, G135A, A141G, |
| | | | | 147-151delEPSPQ, R152D, S157T, T158S, |
| | | | | S180A, L189I, S198G, V199L, V204M, |
| | | | | D238N, E264S, T265S, A266S, S268A, |
| | | | | T273H, K312R, I342V, S416E, 453delN, |
| | | | | P454S, G455T, 458delA, G459S, N460T, |
| | | | | Y466H, G468A, S471A, A477S, V491I, |
| | | | | L495T, Q497N, V520T, A525P, D534S, |
| | | | | R535V, S539I, S540N, I544V, T551S, |
| | | | | N563D, R568K, P569A, I580V, L585I, |
| | | | | A587S, A588Q, T590S, A591N, A592P, |
| | | | | Q593T, V596T, V662T, F706Y, E707D, |
| | | | | S718T |
| 8 | 733aa | BCD_0196 | 90.86% | N41H, A67E, Q105K, V125I, A141G, |
| | | | | P148Q, 152delR, S153E, T158S, K163T, |
| | | | | R169K, R171K, S180P, L189I, A195G, |
| | | | | S198G, V199L, V204M, E264S, T265S, |
| | | | | A266S, S268A, T273H, R314N, I342V, |
| | | | | E412T, S416T, N453T, P454T, G456S, 458- |
| | | | | 460delAGN, Y466H, G468A, S471N, |
| | | | | A477S, V491L, T494N, Q497F, G507A, |
| | | | | V520T, H529N, R535Q, S539I, S540N, |
| | | | | I544V, T551S, N563S, R568K, P569T, |
| | | | | I580Y, 587delA, A588S, N589S, A592G, |
| | | | | 593-594insP, T594S, V596T, A666S, F706Y, |
| | | | | E707A, Q709S, T710N, G711N, D713E, |
| | | | | D717N, S718T, Q719E, S723T |
| 9 | 734aa | BCD_0485 | 92.78% | D24A, N41D, K84Q, A141G, Q165P, |
| | | | | V183A, S201P, G202V, V204M, E264S, |
| | | | | T265S, A266S, S268A, T273H, K312R, |
| | | | | R314N, I342V, E412Q, S416T, N453T, |
| | | | | P454T, G456S, 458-460delAGN, Y466H, |
| | | | | G468A, S471N, F486Y, T494V, N499P, |
| | | | | G507A, N517D, V520A, V524I, H529N, |
| | | | | S539I, S540N, V542T, L543I, T551S, |
| | | | | N563S, I580V, A588S, A591N, A592P, |
| | | | | Q593T, T594S, V596T, A666S, E707D, |
| | | | | Q709S, T710N, G711S, A715S, S718A |
| 10 | 729aa | BCD_0489 | 92.18% | D24A, N41D, K84Q, A141G, V146I, 148- |
| | | | | 152delPSPQR, T158S, R169K, R171K, |
| | | | | D179E, D185E, S201P, G202V, V204M, |
| | | | | E264S, T265S, A266S, S268A, T273H, |
| | | | | K312R, R314N, I342V, E412Q, S416T, |
| | | | | N453T, P454T, G456S, 458-460delAGN, |
| | | | | Y466H, G468A, S471N, F486Y, T494V, |
| | | | | N499P, G507A, N517D, V520A, V524I, |
| | | | | H529N, S539I, S540N, V542T, L543I, |
| | | | | T551S, N563S, I580V, A588S, A591N, |
| | | | | A592P, Q593T, T594S, V596T, A666S, |
| | | | | E707D, Q709S, T710N, G711S, A715S, |
| | | | | S718A |
| 11 | 730aa | BMN_0250 | 91.51% | D24A, K31Q, N41D, A67E, F119L, G135A, |
| | | | | A141G, 147-151delEPSPQ, R152D, S157T, |
| | | | | T158S, S180A, L189I, S198G, V199L, |
| | | | | V204M, D238N, E264S, T265S, A266S, |
| | | | | S268A, T273H, K312R, I342V, S416E, |
| | | | | 453delN, P454S, G455T, 458delA, G459S, |
| | | | | N460T, Y466H, G468A, S471A, A477S, |
| | | | | V491I, L495T, Q497N, N517S, V520T, |
| | | | | A525P, D534S, R535V, S539I, S540N, |
| | | | | I544V, T551S, N563D, R568K, P569A, |
| | | | | I580V, L585I, A587S, A588Q, T590S, |
| | | | | A591N, A592P, Q593T, V596T, V662T, |
| | | | | F706Y, E707D, D713G, S718T |
| 12 | 730aa | BMN 0251 | 91.92% | D24A, K31Q, N41D, A67E, G135A, A141G, |
| | | | | 147-151delEPSPQ, R152D, S157T, T158S, |
| | | | | S180A, L189I, S198G, V199L, V204M, |
| | | | | D238N, E264S, T265S, A266S, S268A, |
| | | | | T273H, K312R, I342V, S416E, 453delN, |
| | | | | P454S, G455T, 458delA, G459S, N460T, |
| | | | | Y466H, G468A, S471A, A477S, V491I, |
| | | | | L495T, Q497N, V520T, A525P, D534S, |
| | | | | R535V, S539I, S540N, I544V, T551S, |
| | | | | N563D, R568K, P569A, I580V, L585I, |
| | | | | A587S, A588Q, T590S, A591N, A592P, |
| | | | | Q593T, V596T, V662T, F706Y, E707D, |
| | | | | S718T |
| 13 | 730aa | BMN_0253 | 91.51% | D24A, K31Q, N41D, A67E, G135A, A141G, |
| | | | | 147-151delEPSPQ, R152D, S157T, T158S, |
| | | | | S180A, L189I, S198G, V199L, V204M, |
| | | | | S226P, D238N, E264S, T265S, A266S, |
| | | | | S268A, T273H, Q299P, K312R, I342V, |
| | | | | S416E, L444P, 453delN, P454S, G455T, |
| | | | | 458delA, G459S, N460T, Y466H, G468A, |
| | | | | S471A, A477S, V491I, L495T, Q497N, |
| | | | | V520T, A525P, D534S, R535V, S539I, |
| | | | | S540N, I544V, T551S, N563D, R568K, |
| | | | | P569A, I580V, L585I, A587S, A588Q, |
| | | | | T590S, A591N, A592P, Q593A, V596T, |
| | | | | V662T, F706Y, E707D, S718T |
| 14 | 730aa | BMN_0254 | 91.10% | D24A, K31Q, N41D, V46M, A67E, G135A, |
| | | | | A141G, 147-151delEPSPQ, R152D, S157T, |
| | | | | T158S, S180A, L189I, S198G, V199L, |
| | | | | V204M, N228S, D238N, E264S, T265S, |
| | | | | A266S, S268A, T273H, K312R, I342V, |
| | | | | S386R, S416E, L444P, 453delN, P454S, |
| | | | | G455T, 458delA, G459S, N460T, Y466H, |
| | | | | G468A, S471A, A477S, V491I, L495T, |
| | | | | Q497N, V520T, A525P, D534S, R535V, |
| | | | | S539I, S540N, I544V, T551S, L560P, |
| | | | | N563D, R568K, P569A, I580V, L585I, |
| | | | | A587S, A588Q, T590S, A591N, A592P, |
| | | | | Q593T, V596T, V662T, S693N, F706Y, |
| | | | | E707D, S718T |
| 15 | 730aa | BMN 0255 | 91.51% | D24A, K31Q, N41D, N57S, A67E, G135A, |
| | | | | A141G, 147-151delEPSPQ, R152D, S157T, |
| | | | | T158S, S180A, L189I, S198G, V199L, |
| | | | | V204M, D238N, N255D, E264S, T265S, |
| | | | | A266S, S268A, T273H, K312R, I342V, |
| | | | | S416E, 453delN, P454S, G455T, 458delA, |
| | | | | G459S, N460T, Y466H, G468A, S471A, |
| | | | | A477S, V491I, L495T, Q497N, V520T, |
| | | | | A525P, D534S, R535V, S539I, S540N, |
| | | | | I544V, T551S, N563D, R568K, P569A, |
| | | | | I580V, L585I, A587S, A588Q, T590S, |
| | | | | A591N, A592P, Q593T, V596T, Q609R, |
| | | | | V662T, F706Y, E707D, S718T |
| 16 | 730aa | BMN 0256 | 91.51% | D24A, K31Q, N41D, A67E, G135A, A141G, |
| | | | | 147-151delEPSPQ, R152D, S157T, T158S, |
| | | | | S180A, L189I, S198G, V199L, V204M, |
| | | | | D238N, E264S, T265S, A266S, S268A, |
| | | | | T273H, K312R, I342V, S416E, L447M, |
| | | | | 453delN, P454S, G455T, 458delA, G459S, |
| | | | | N460T, L463P, Y466H, G468A, S471A, |
| | | | | A477S, V491I, L495T, Q497N, V520T, |
| | | | | A525P, D534S, R535V, S539I, S540N, |
| | | | | I544V, T551S, N563D, R568K, P569A, |
| | | | | I580V, L585I, A587S, A588Q, T590S, |
| | | | | A591N, A592P, Q593T, V596T, N629D, |
| | | | | V662T, F706Y, E707D, S718T |
| 17 | 730aa | BMN 0257 | 91.78% | D24A, K31Q, N41D, A67E, G135A, A141G, |
| | | | | 147-151delEPSPQ, R152D, S157T, T158S, |
| | | | | S180A, L189I, S198G, V199L, V204M, |
| | | | | D238N, E264G, T265S, A266S, S268A, |
| | | | | T273H, K312R, I342V, M404V, S416E, |
| | | | | 453delN, P454S, G455T, 458delA, G459S, |
| | | | | N460T, Y466H, G468A, S471A, A477S, |
| | | | | V491I, L495S, Q497N, V520T, A525P, |
| | | | | D534S, R535V, S539I, S540N, I544V, |
| | | | | T551S, N563D, R568K, P569A, I580V, |
| | | | | L585I, A587S, A588Q, T590S, A591N, |
| | | | | A592P, Q593T, V596T, V662T, F706Y, |
| | | | | E707D, S718T |
| 18 | 730aa | BMN 0258 | 91.23% | D24A, K31Q, N41D, K51R, A67E, V125I, |
| | | | | G135A, A141G, K143E, 147-151delEPSPQ, |
| | | | | R152D, S157T, T158S, S180A, L189I, |
| | | | | S198G, V199L, V204M, D238N, N254D, |
| | | | | E264S, T265S, A266S, S268A, T273H, |
| | | | | K312R, I342V, S416E, 453delN, P454S, |
| | | | | G455T, 458delA, G459S, N460T, Y466H, |
| | | | | G468A, S471A, A477S, V491I, L495T, |
| | | | | Q497N, V520T, A525P, D534S, R535V, |
| | | | | S539I, S540N, I544V, F545L, T551S, |
| | | | | N563D, R568K, P569A, I580V, L585I, |
| | | | | A587S, A588Q, T590S, A591N, A592P, |
| | | | | Q593T, V596T, V662T, F706Y, E707D, |
| | | | | S718T |
| 19 | 730aa | BMN 0260 | 91.64% | D24A, K31R, N41D, A67E, G135A, A141G, |
| | | | | 147-151delEPSPQ, R152D, S157T, T158S, |
| | | | | S180A, L189I, S198G, V199L, V204M, |
| | | | | D238N, E264S, T265S, A266S, S268A, |
| | | | | T273H, K312R, I342V, C396R, S416E, |
| | | | | 453delN, P454S, G455T, 458delA, G459S, |
| | | | | N460T, Y466H, G468A, S471A, A477S, |
| | | | | V491I, L495T, Q497N, V520T, A525P, |
| | | | | K530R, D534S, R535V, S539I, S540N, |
| | | | | I544V, T551S, N563D, R568K, P569A, |
| | | | | I580V, L585I, A587S, A588Q, T590S, |
| | | | | A591N, A592P, Q593T, V596T, V662T, |
| | | | | F706Y, E707D, S718T |

TABLE 2.10
Branch 2 - Clade 11

| | | | % identity to | |
|---|---|---|---|---|
| | AA | | representative | Varying amino acid residues relative to the |
| No. | Length | Name | sequence | representative sequence |
| 0 | 736aa | AAV-9 | * | |
| | | (SEQ ID | | |
| | | NO: 9) | | |
| 1 | 736aa | BCD_0112 | 99.59% | V146I, A157V, Q412T |
| 2 | 736aa | BMN 0316 | 98.37% | H38K, N41D, A42G, G56F, A67E, K92R, |
| | | | | K105Q, L125V, Q412T, T460A, M635V, |
| | | | | S680R |
| 3 | 736aa | BMN 0317 | 98.51% | H38K, N41D, A42G, G56F, A67E, K92R, |
| | | | | K105Q, L125V, L405P, Q412T, E682A |
| 4 | 736aa | BMN 0318 | 98.64% | H38K, N41D, A42G, G56F, A67E, K92R, |
| | | | | K105Q, L125V, Q412T, L435P |
| 5 | 736aa | BMN 0319 | 98.37% | H38K, N41D, A42G, G56F, A67E, K92R, |
| | | | | K105Q, L125V, K168I, T244I, N287S, |
| | | | | Q412T |
| 6 | 736aa | BMN 0320 | 98.78% | H38K, N41D, A42G, G56F, A67E, |
| | | | | K92R, K105Q, L125V, Q412T |
| 7 | 736aa | BMN 0321 | 98.51% | H38K, N41D, A42G, G56F, A67E, |
| | | | | K92R, K105Q, L125V, Q233R, V331A, |
| | | | | Q412T |

TABLE 2.11
Branch 2 - Clade 12

| | | | % identity to | |
|---|---|---|---|---|
| | AA | | representative | Varying amino acid residues relative to the |
| No. | Length | Name | sequence | representative sequence |
| 0 | 735aa | AAV-2 | * | |
| | | (SEQ ID | | |
| | | NO: 4) | | |
| 1 | 735aa | BCD_0105 | 96.05% | A35N, E36Q, R37Q, K39R, R81H, D84K, |
| | | | | S85Q, K105Q, P135A, V151A, A162S, |
| | | | | A179T, D180E, L188I, Q190E, L198V, |
| | | | | T200S, T205S, S207G, Q263E, S267T, |
| | | | | R310K, R447K, S492A, S578A, R585S, |
| | | | | R588T, A593S, D711E |
| 2 | 735aa | BCD_0137 | 97.69% | V125I, V151A, A162S, T205S, P293Y, |
| | | | | Q297E, R298T, N312S, Q457M, S492A, |
| | | | | E499D, F533Y, G546D, E548G, R585S, |
| | | | | R588T, A593S |
| 3 | 735aa | BCD_0447 | 97.96% | V151A, A162S, N312S, R447K, T450A, |
| | | | | Q457M, S492A, E499D, F533Y, G546D, |
| | | | | E548G, S578A, R585S, R588T, A593S |

TABLE 2.12
Branch 2 - Clade 13

| | | | % identity to | |
|---|---|---|---|---|
| | AA | | representative | Varying amino acid residues relative to the |
| No. | Length | Name | sequence | representative sequence |
| 0 | 739aa | BCD_0159 | * | |
| | | (SEQ ID | | |
| | | NO: 27) | | |
| 1 | 739aa | BCD_0167 | 99.59% | N719D, A720T, D721N |
| 2 | 739aa | BCD_0168 | 98.65% | P48L, K61R, V65A, H75Y, S519P, V609A, |
| | | | | N699S, N719D, A720T, D721N |
| 3 | 739aa | BCD_0169 | 99.19% | T138A, I244T, Q323L, K463R, S467F, |
| | | | | E566V |
| 4 | 739aa | BCD_0170 | 99.19% | H75F, N151S, F670S, N719D, A720T, |
| | | | | D721N |
| 5 | 739aa | BCD_0171 | 99.32% | N151I, S236P, Y256H, L319P, D435G |
| 6 | 739aa | BCD_0172 | 99.05% | H75Y, F291L, L643P, L690P, N719D, |
| | | | | A720T, D721N |

TABLE 2.13
Branch 2 - Clade 16

| | | | % identity to | |
|---|---|---|---|---|
| | AA | | representative | Varying amino acid residues relative to the |
| No. | Length | Name | sequence | representative sequence |
| 0 | 736aa | AAV-1 | * | |
| | | (SEQ ID | | |
| | | NO: 3) | | |
| 1 | 736aa | AAV-6 | 99.18% | L129F, E418D, E531K, F584L, A598V, |
| | | | | N642H |
| 2 | 736aa | BCD_0441 | 97.83% | A67E, L188I, T194A, A196S, A197G, |
| | | | | V198L, P200S, T201N, A224S, E418D, |
| | | | | G505S, F584L, A592V, A598V, A601V, |
| | | | | N642H |
| 3 | 736aa | BCD_0442 | 98.51% | D24N, D41N, K84Q, L129F, T162S, |
| | | | | E418D, G505S, F584L, A592V, A598V, |
| | | | | N642H |

TABLE 2.14
Branch 2 - Clade 21

| | | | % identity to | |
|---|---|---|---|---|
| | AA | | representative | Varying amino acid residues relative to the |
| No. | Length | Name | sequence | representative sequence |
| 0 | 736aa | AAV LK03 | * | |
| | | (SEQ ID | | |
| | | NO: 1) | | |
| 1 | 733aa | AAV-13 | 94.54% | 2delA, A3T, I19V, K105Q, L125I, D147E, |
| | | | | Q151A, V159I, K164Q, S179T, E190Q, |
| | | | | T196S, S197G, L198V, N201T, S267T, |
| | | | | K310R, S312N, 450delG, T452A, 455delT, |
| | | | | N457Q, Q469T, R476K, T492Q, A505G, |
| | | | | S507T, E531K, N540T, T549N, S551N, |
| | | | | E554D, D556E, A581S, S586N, T589A, |
| | | | | A590G, R594G, D598H, T661N, P664A, |
| | | | | P735N |
| 2 | 736aa | AAV-3b | 98.91% | Q26K, A29V, K31Q, A42R, A67E, K105Q, |
| | | | | L125I, P735N |
| 3 | 735aa | BCD_0113 | 91.56% | N14T, E21Q, A24K, Q26K, A29P, |
| | | | | K31P, A34P, N35A, Q36E, Q37R, Q39K, |
| | | | | N41D,A42S, G56F, A67E, Q81R, K84D, |
| | | | | A85S, L125V, A135P, A136V, D147E, |
| | | | | Q148H, Q151A, V159I, S162A, K164Q, |
| | | | | S179A, E180D, E190Q, T196S, S197G, |
| | | | | N201T, S205T, G207S, M211V, K310R, |
| | | | | S312N, R447K, 450delG, T451S, T452N, |
| | | | | T456L, N457Q, Q469T, R476K, T492Q, |
| | | | | S507T, N540T, E546Q, T549N, S551N, |
| | | | | N552D, E554D, T579Y, A581S, S586N, |
| | | | | A590G, R594G, D598H, T661N, P664S, |
| | | | | P735N |
| 4 | 735aa | BCD_0114 | 91.56% | N14T, E21Q, A24K, Q26K, A29P, |
| | | | | K31P, A34P, N35A, Q36E, Q37R, Q39K, |
| | | | | N41D, A42S, G56F, A67E, Q81R, K84D, |
| | | | | A85S, L125V, A135P, A136V, D147E, |
| | | | | Q148H, Q151A, V159T, S162A, K164Q, |
| | | | | S179A, E180D, E190Q, T196S, S197G, |
| | | | | N201T, S205T, G207S, M211V, K310R, |
| | | | | S312N, R447K, 450delG, T451S, T452N, |
| | | | | T456L, N457Q, Q469T, R476K, T492Q, |
| | | | | S507T, N540T, E546Q, T549N, S551N, |
| | | | | N552D, E554D, T579Y, A581S, S586N, |
| | | | | A590G, R594G, D598H, T661N, P664S, |
| | | | | P735N |
| 5 | 735aa | BCD_0115 | 91.43% | N14T, E21Q, A24K, Q26K, A29P, K31P, |
| | | | | A34P, N35A, Q36E, Q37R, Q39K, N41D, |
| | | | | A42S, G56F, A67E, Q81R, K84D, A85S, |
| | | | | L125V, A135P, A136V, D147E, Q148H, |
| | | | | Q151A, V159T, S162A, K164Q, S179A, |
| | | | | E180D, E190Q, T196S, S197G, N201T, |
| | | | | S205T, G207S, K310R, S312N, Q410T, |
| | | | | R447K, 450delG, T451S, T452N, T456L, |
| | | | | N457Q, Q469N, R476K, T492Q, S507T, |
| | | | | N540T, E546Q, T548A, T549N, S551N, |
| | | | | N552D, E554D, T579Y, A581S, S586N, |
| | | | | A590G, R594G, D598H, T661N, P664A, |
| | | | | P735N |
| 6 | 735aa | BCD_0117 | 91.56% | N14T, E21Q, A24K, Q26K, A29P, K31P, |
| | | | | A34P, N35A, Q36E, Q37R, Q39K, N41D, |
| | | | | A42S, G56F, A67E, Q81R, K84D, A85S, |
| | | | | L125V, A135P, A136V, D147E, Q148H, |
| | | | | Q151A, V159I, S162A, K164Q, S179A, |
| | | | | E180D, E190Q, T196S, S197G, N201T, |
| | | | | S205T, G207S, M211V, K310R, S312N, |
| | | | | R447K, 450delG, T451S, T452N, T456L, |
| | | | | N457Q, Q469T, R476K, T492Q, S507T, |
| | | | | N540T, E546Q, T549N, S551N, N552D, |
| | | | | E554D, T579Y, A581S, S586N, A590G, |
| | | | | R594G, D598H, T661N, P664S, P735N |

TABLE 2.15
Branch 2 - Clade 22

| | | | % identity to | |
|---|---|---|---|---|
| | AA | | representative | Varying amino acid residues relative to the |
| No. | Length | Name | sequence | representative sequence |
| 0 | 741aa | BCD_0135 | * | |
| | | (SEQ ID NO: | | |
| | | 23) | | |
| 1 | 741aa | BCD_0157 | 99.73% | P168Q, N175D |

[0168] In some embodiments, an AAV clade member is a capsid protein with an amino acid identity of at least 90% identity, at least 91% identity, at least 92% identity, at least 93% identity, or at least 94% identity to a VP1, VP2, or VP3 of a novel reference capsid (e.g., a VP1 capsid protein of AAV VP1 capsid protein No. 0 in any one of Table 2, or VP2 or VP3 capsid proteins derived therefrom). In certain embodiments, an AAV clade member is a capsid protein with an amino acid identity of at least 95% identity, at least 96% identity, at least 97% identity, at least 98% identity, at least 99% identity, or 100% identity to a VP1, VP2, or VP3 of a novel reference capsid (e.g., a VP1 capsid protein of AAV VP1 capsid protein No. 0 in any one of Table 2, or VP2 or VP3 capsid proteins derived therefrom). In accordance with these embodiments, in specific embodiments, AAV clade members that are known in the art are not encompassed by the present disclosure (e.g., AAV VP1 capsid sequences disclosed in any one of Table 2 with a prefix other than “BCD” and VP1 capsid sequences of any of the AAVs listed in Table 4 or Item A or Item B are not encompassed by the present disclosure).

[0169] In some embodiments, an AAV clade member is a capsid protein with an amino acid identity of at least 90% identity, at least 91% identity, at least 92% identity, at least 93% identity, or at least 94% identity to a VP1 of a novel reference capsid (e.g., a VP1 capsid protein of AAV VP1 capsid protein No. 0 in any one of Table 2). In certain embodiments, an AAV clade member is a capsid protein with an amino acid identity of at least 95% identity, at least 96% identity, at least 97% identity, at least 98% identity, at least 99% identity, or 100% identity to a VP1 of a novel reference capsid (e.g., a VP1 capsid protein of AAV VP1 capsid protein No. 0 in any one of Table 2). In accordance with these embodiments, in specific embodiments, AAV clade members that are known in the art are not encompassed by the present disclosure (e.g., AAV VP1 capsid sequences disclosed in any one of Table 2 with a prefix other than “BCD” and VP1 capsid sequences of any of the AAVs listed in Table 4 or Item A or Item B are not encompassed by the present disclosure).

[0170] In some embodiments, an AAV clade member is a capsid protein with an amino acid identity of at least 90% identity, at least 91% identity, at least 92% identity, at least 93% identity, or at least 94% identity to a VP2 of a novel reference capsid (e.g., a VP2 capsid protein of AAV VP1 capsid protein No. 0 in any one of Table 2). In certain embodiments, an AAV clade member is a capsid protein with an amino acid identity of at least 95% identity, at least 96% identity, at least 97% identity, at least 98% identity, at least 99% identity, or 100% identity to a VP2 of a novel reference capsid (e.g., a VP2 capsid protein of AAV VP1 capsid protein No. 0 in any one of Table 2). In accordance with these embodiments, in specific embodiments, AAV clade members that are known in the art are not encompassed by the present disclosure (e.g., AAV VP1 capsid sequences disclosed in any one of Table 2 with a prefix other than “BCD” and VP1 capsid sequences of any of the AAVs listed in Table 4 or Item A or Item B are not encompassed by the present disclosure).

[0171] In some embodiments, an AAV clade member is a capsid protein with an amino acid identity of at least 90% identity, at least 91% identity, at least 92% identity, at least 93% identity, or at least 94% identity to a VP3 of a novel reference capsid (e.g., a VP3 capsid protein of AAV VP1 capsid protein No. 0 in any one of Table 2). In certain embodiments, an AAV clade member is a capsid protein with an amino acid identity of at least 95% identity, at least 96% identity, at least 97% identity, at least 98% identity, at least 99% identity, or 100% identity to a VP3 of a novel reference capsid (e.g., a VP3 capsid protein of AAV VP1 capsid protein No. 0 in any one of Table 2). In accordance with these embodiments, in specific embodiments, AAV clade members that are known in the art are not encompassed by the present disclosure (e.g., AAV VP1 capsid sequences disclosed in any one of Table 2 with a prefix other than “BCD” and VP1 capsid sequences of any of the AAVs listed in Table 4 or Item A or Item B are not encompassed by the present disclosure).

[0172] In some embodiments, the structural homology of an AAV capsid protein (e.g., VP1, VP2 or VP3) can be determined by structural alignment with the SSM (Secondary Structure Matching) program. See Krissinel E, Henrick K. Secondary-structure matching (SSM), a new tool for fast protein structure alignment in three dimensions. Acta Crystallogr D Biol Crystallogr. 2004 December; 60 (Pt 12 Pt 1): 2256-68. doi: 10.1107/S0907444904026460. For example, the crystal structure of a AAV capsid viral protein (VP) can be determined and compared to the crystal structure of a VP of a representative member of an AAV clade. The crystal structure of an AAV capsid protein can be determined using cryo-EM (X-ray crystallography) or cryo-reconstruction.

### 6.3.2.2 Representative Sequence

[0173] The present disclosure also provides AAV clades grouped by their VP1 sequence being substantially related to a representative sequence. Representative sequences of such AAV clades are described in Table 2 and are designated No. “0”.

[0174] A representative sequence of a novel AAV clade can be determined using algorithms such as, ClustalW (e.g., ClustalW with cost matrix BLOSUM, a gap open cost of 10, and a gap extend cost of 0.1), and a clustering algorithm such as CD-HIT or USEARCH., as described in the following papers, Weizhong Li, Lukasz Jaroszewski & Adam Godzik. Bioinformatics (2001) 17:282-283, Weizhong Li, Lukasz Jaroszewski & Adam Godzik. Bioinformatics (2002) 18:77-82, PDF, Pubmed; Weizhong Li & Adam Godzik. Bioinformatics (2006) 22:1658-165, which are incorporated by reference. Briefly, a clustering algorithm will sort a set of amino acid sequences by length. Typically, the longest sequence will become the representative sequence of a cluster. Then each remaining sequence in the set is compared to the representative sequence. If the sequence similarity or identity of each remaining sequence is within the threshold of interest as compared to the representative sequence, then it is included as a member of that cluster.

[0175] Using the representative sequence novel clades were identified. The alignment of the VP1 capsid proteins for all the AAV clades with two or more members are provided in FIGS. 4-13. For AAV clades with only one member identified thus far, alignments are not provided but are shown in Table 2.

[0176] In certain embodiments, a clade member can include one or more of the AAV clade members listed in any one of Tables 2.6 to 2.15. In specific embodiments, novel AAV capsid proteins of clade 1 include any one of or all of Nos. 2 to 48. In specific embodiments, novel AAV capsid proteins of clade 4 include any one of or all of Nos. 2 to 59. In specific embodiments, novel AAV capsid proteins of clade 6 include any one of or all of Nos. 1 to 19. In specific embodiments, novel AAV capsid proteins of clade 11 include any one of or all of Nos. 1 to 7. In specific embodiments, novel AAV capsid proteins of clade 12 include any one of or all of Nos. 1 to 3. In specific embodiments, novel AAV capsid proteins of clade 13 include any one of or all of Nos. 0 to 6. In specific embodiments, novel AAV capsid proteins of clade 16 include any one of or all of Nos. 2 to 3. In specific embodiments, novel AAV capsid proteins of clade 21 include any one of or all of Nos. 3 to 6. In specific embodiments, novel AAV capsid proteins of clade 22 include any one of or all of Nos. 0 to 1.

[0177] In specific embodiments, a member of clade 0 comprises an amino acid sequence of an AAV capsid of any one of Nos. 0-50 in Table 2.6 with one or more mutations, such as one or more amino acid substitutions (e.g., 1, 2, 3, 4, 5, 6, 7, 8, 9 or more), recited in Table 2.6, provided that the mutation(s) (e.g., amino acid substitution(s)) does not result in a known AAV capsid. In specific embodiments, a member of clade 1 comprises an amino acid sequence of an AAV capsid of any one of Nos. 0-48 in Table 2.7 with one or more mutations, such as one or more amino acid substitutions (e.g., 1, 2, 3, 4, 5, 6, 7, 8, 9 or more), recited in Table 2.7, provided that the mutation(s) (e.g., amino acid substitution(s)) does not result in a known AAV capsid. In specific embodiments, a member of clade 4 comprises an amino acid sequence of an AAV capsid of any one of Nos. 0-29 in Table 2.8 with one more mutations, such as one or more amino acid substitutions (e.g., 1, 2, 3, 4, 5, 6, 7, 8, 9 or more), recited in Table 2.8, provided that the mutation(s) (e.g., amino acid substitution(s)) does not result in a known AAV capsid. In specific embodiments, a member of clade 6 comprises an amino acid sequence of an AAV capsid of any one of Nos. 0-19 in Table 2.9 with one or more mutations, such as one or more amino acid substitutions (e.g., 1, 2, 3, 4, 5, 6, 7, 8, 9 or more), recited in Table 2.9, provided that the mutation(s) (e.g., amino acid substitution(s) does not result in a known AAV capsid. In specific embodiments, a member of clade 11 comprises an amino acid sequence of an AAV capsid of any one of Nos. 0-7 in Table 2.10 with one or more mutations, such as one or more amino acid substitutions (e.g., 1, 2, 3, 4, 5, 6, 7, 8, 9 or more), recited in Table 2.10, provided that the mutation(s) (e.g., amino acid substitution(s) does not result in a known AAV capsid. In specific embodiments, a member of clade 12 comprises an amino acid sequence of an AAV capsid of any one of Nos. 0-3 in Table 2.11 with one or more mutations, such as one or more amino acid substitutions (e.g., 1, 2, 3, 4, 5, 6, 7, 8, 9 or more), recited in Table 2.11, provided that the mutation(s) (e.g., amino acid substitution(s) does not result in a known AAV capsid. In specific embodiments, a member of clade 13 comprises an amino acid sequence of an AAV capsid of any one of Nos. 0-6 in Table 2.12 with one or more mutations, such as one or more amino acid substitutions (e.g., 1, 2, 3, 4, 5, 6, 7, 8, 9 or more), recited in Table 2.12, provided that the mutation(s) (e.g., amino acid substitution(s) does not result in a known AAV capsid. In specific embodiments, a member of clade 16 comprises an amino acid sequence of an AAV capsid of any one of Nos. 0-3 in Table 2.13 with one or more mutations, such as one or more amino acid substitutions (e.g., 1, 2, 3, 4, 5, 6, 7, 8, 9 or more), recited in Table 2.13, provided that the mutation(s) (e.g., amino acid substitution(s) does not result in a known AAV capsid. In specific embodiments, a member of clade 21 comprises an amino acid sequence of an AAV capsid of any one of Nos. 0-6 in Table 2.14 with one or more mutations, such as one or more amino acid substitutions (e.g., 1, 2, 3, 4, 5, 6, 7, 8, 9 or more), recited in Table 2.14, provided that the mutation(s) (e.g., amino acid substitution(s) does not result in a known AAV capsid. In specific embodiments, a member of clade 22 comprises an amino acid sequence of an AAV capsid of any one of Nos. 0-1 in Table 2.15 with one or more mutations, such as one or more amino acid substitutions (e.g., 1, 2, 3, 4, 5, 6, 7, 8, 9 or more), recited in Table 2.15, provided that the mutation(s) (e.g., amino acid substitution(s) does not result in a known AAV capsid.

[0178] In a specific embodiment, an AAV capsid member of a novel AAV clade of the disclosure has an VP1 amino acid sequence that is substantially related to a representative amino acid sequence of a novel AAV clade. In another specific embodiment, an AAV clade member encompassed by the disclosure comprises a VP1 capsid protein with at least about 90% identity to VP1 of AAV clade member No. 0 in any one of Table 2. In another specific embodiment, an AAV clade member encompassed by the disclosure comprises a VP1 capsid protein with at least about 91% identity to VP1 of AAV clade member No. 0 in any one of Table 2. In another specific embodiment, an AAV clade member encompassed by the disclosure comprises a VP1 capsid protein with at least about 92% identity to VP1 of AAV clade member No. 0 in any one of Table 2. In a specific embodiment, an AAV clade member encompassed by the disclosure comprises a VP1 capsid protein with at least about 93% identity to VP1 of AAV clade member No. 0 in any one of Table 2. In another specific embodiment, an AAV clade member encompassed by the disclosure comprises a VP1 capsid protein with at least about 94% identity to VP1 of AAV clade member No. 0 in any one of Table 2. In another specific embodiment, an AAV clade member encompassed by the disclosure comprises a VP1 capsid protein with at least about 95% identity to VP1 of AAV clade member No. 0 in any one of Table 2. In another specific embodiment, an AAV clade member encompassed by the disclosure comprises a VP1 capsid protein with at least about 96% identity to VP1 of AAV clade member No. 0 in any one of Table 2. In another specific embodiment, an AAV clade member encompassed by the disclosure comprises a VP1 capsid protein with at least about 97% identity to VP1 of AAV clade member No. 0 in any one of Table 2. In another specific embodiment, an AAV clade member encompassed by the disclosure comprises a VP1 capsid protein with at least about 98% identity to VP1 of AAV clade member No. 0 in any one of Table 2. In another specific embodiment, an AAV clade member encompassed by the disclosure comprises a VP1 capsid protein with at least about 99% identity to VP1 of AAV clade member No. 0 in any one of Table 2. In some embodiments, the AAV clade member is a member of clade 0. In some embodiments, the AAV clade member is a member of clade 1. In some embodiments, the AAV clade member is a member of clade 4. In some embodiments, the AAV clade member is a member of clade 6. In some embodiments, the AAV clade member is a member of clade 11. In some embodiments, the AAV clade member is a member of clade 12. In some embodiments, the AAV clade member is a member of clade 13. In some embodiments, the AAV clade member is a member of clade 16. In some embodiments, the AAV clade member is a member of clade 21. In some embodiments, the AAV clade member is a member of clade 22.

[0179] In some embodiments, an AAV clade member encompassed by the disclosure comprises a VP1 capsid protein with at least about 90% identity to VP1 of AAV clade member No. 0 in Table 2.6. In some embodiments, an AAV clade member encompassed by the disclosure comprises a VP1 capsid protein with at least about 90% identity to VP1 of AAV clade member No. 0 in Table 2.7. In some embodiments, an AAV clade member encompassed by the disclosure comprises a VP1 capsid protein with at least about 90% identity to VP1 of AAV clade member No. 0 in Table 2.8. In some embodiments, an AAV clade member encompassed by the disclosure comprises a VP1 capsid protein with at least about 90% identity to VP1 of AAV clade member No. 0 in Table 2.9. In some embodiments, an AAV clade member encompassed by the disclosure comprises a VP1 capsid protein with at least about 90% identity to VP1 of AAV clade member No. 0 in Table 2.10. In some embodiments, an AAV clade member encompassed by the disclosure comprises a VP1 capsid protein with at least about 90% identity to VP1 of AAV clade member No. 0 in Table 2.11. In some embodiments, an AAV clade member encompassed by the disclosure comprises a VP1 capsid protein with at least about 90% identity to VP1 of AAV clade member No. 0 in Table 2.12. In some embodiments, an AAV clade member encompassed by the disclosure comprises a VP1 capsid protein with at least about 90% identity to VP1 of AAV clade member No. 0 in Table 2.13. In some embodiments, an AAV clade member encompassed by the disclosure comprises a VP1 capsid protein with at least about 90% identity to VP1 of AAV clade member No. 0 in Table 2.14. In some embodiments, an AAV clade member encompassed by the disclosure comprises a VP1 capsid protein with at least about 90% identity to VP1 of AAV clade member No. 0 in Table 2.15. In specific embodiments, an AAV clade member encompassed by the disclosure is not a known AAV capsid.

[0180] In some embodiments, an AAV clade member encompassed by the disclosure comprises a VP1 capsid protein with at least about 91% identity to VP1 of AAV clade member No. 0 in Table 2.6. In some embodiments, an AAV clade member encompassed by the disclosure comprises a VP1 capsid protein with at least about 91% identity to VP1 of AAV clade member No. 0 in Table 2.7. In some embodiments, an AAV clade member encompassed by the disclosure comprises a VP1 capsid protein with at least about 91% identity to VP1 of AAV clade member No. 0 in Table 2.8. In some embodiments, an AAV clade member encompassed by the disclosure comprises a VP1 capsid protein with at least about 91% identity to VP1 of AAV clade member No. 0 in Table 2.9. In some embodiments, an AAV clade member encompassed by the disclosure comprises a VP1 capsid protein with at least about 91% identity to VP1 of AAV clade member No. 0 in Table 2.10. In some embodiments, an AAV clade member encompassed by the disclosure comprises a VP1 capsid protein with at least about 91% identity to VP1 of AAV clade member No. 0 in Table 2.11. In some embodiments, an AAV clade member encompassed by the disclosure comprises a VP1 capsid protein with at least about 91% identity to VP1 of AAV clade member No. 0 in Table 2.12. In some embodiments, an AAV clade member encompassed by the disclosure comprises a VP1 capsid protein with at least about 91% identity to VP1 of AAV clade member No. 0 in Table 2.13. In some embodiments, an AAV clade member encompassed by the disclosure comprises a VP1 capsid protein with at least about 91% identity to VP1 of AAV clade member No. 0 in Table 2.14. In some embodiments, an AAV clade member encompassed by the disclosure comprises a VP1 capsid protein with at least about 91% identity to VP1 of AAV clade member No. 0 in Table 2.15. In specific embodiments, an AAV clade member encompassed by the disclosure is not a known AAV capsid.

[0181] In some embodiments, an AAV clade member encompassed by the disclosure comprises a VP1 capsid protein with at least about 92% identity to VP1 of AAV clade member No. 0 in Table 2.6. In some embodiments, an AAV clade member encompassed by the disclosure comprises a VP1 capsid protein with at least about 92% identity to VP1 of AAV clade member No. 0 in Table 2.7. In some embodiments, an AAV clade member encompassed by the disclosure comprises a VP1 capsid protein with at least about 92% identity to VP1 of AAV clade member No. 0 in Table 2.8. In some embodiments, an AAV clade member encompassed by the disclosure comprises a VP1 capsid protein with at least about 92% identity to VP1 of AAV clade member No. 0 in Table 2.9. In some embodiments, an AAV clade member encompassed by the disclosure comprises a VP1 capsid protein with at least about 92% identity to VP1 of AAV clade member No. 0 in Table 2.10. In some embodiments, an AAV clade member encompassed by the disclosure comprises a VP1 capsid protein with at least about 92% identity to VP1 of AAV clade member No. 0 in Table 2.11. In some embodiments, an AAV clade member encompassed by the disclosure comprises a VP1 capsid protein with at least about 92% identity to VP1 of AAV clade member No. 0 in Table 2.12. In some embodiments, an AAV clade member encompassed by the disclosure comprises a VP1 capsid protein with at least about 92% identity to VP1 of AAV clade member No. 0 in Table 2.13. In some embodiments, an AAV clade member encompassed by the disclosure comprises a VP1 capsid protein with at least about 92% identity to VP1 of AAV clade member No. 0 in Table 2.14. In some embodiments, an AAV clade member encompassed by the disclosure comprises a VP1 capsid protein with at least about 92% identity to VP1 of AAV clade member No. 0 in Table 2.15. In specific embodiments, an AAV clade member encompassed by the disclosure is not a known AAV capsid.

[0182] In some embodiments, an AAV clade member encompassed by the disclosure comprises a VP1 capsid protein with at least about 93% identity to VP1 of AAV clade member No. 0 in Table 2.6. In some embodiments, an AAV clade member encompassed by the disclosure comprises a VP1 capsid protein with at least about 93% identity to VP1 of AAV clade member No. 0 in Table 2.7. In some embodiments, an AAV clade member encompassed by the disclosure comprises a VP1 capsid protein with at least about 93% identity to VP1 of AAV clade member No. 0 in Table 2.8. In some embodiments, an AAV clade member encompassed by the disclosure comprises a VP1 capsid protein with at least about 93% identity to VP1 of AAV clade member No. 0 in Table 2.9. In some embodiments, an AAV clade member encompassed by the disclosure comprises a VP1 capsid protein with at least about 93% identity to VP1 of AAV clade member No. 0 in Table 2.10. In some embodiments, an AAV clade member encompassed by the disclosure comprises a VP1 capsid protein with at least about 93% identity to VP1 of AAV clade member No. 0 in Table 2.11. In some embodiments, an AAV clade member encompassed by the disclosure comprises a VP1 capsid protein with at least about 93% identity to VP1 of AAV clade member No. 0 in Table 2.12. In some embodiments, an AAV clade member encompassed by the disclosure comprises a VP1 capsid protein with at least about 93% identity to VP1 of AAV clade member No. 0 in Table 2.13. In some embodiments, an AAV clade member encompassed by the disclosure comprises a VP1 capsid protein with at least about 93% identity to VP1 of AAV clade member No. 0 in Table 2.14. In some embodiments, an AAV clade member encompassed by the disclosure comprises a VP1 capsid protein with at least about 93% identity to VP1 of AAV clade member No. 0 in Table 2.15. In specific embodiments, an AAV clade member encompassed by the disclosure is not a known AAV capsid.

[0183] In some embodiments, an AAV clade member encompassed by the disclosure comprises a VP1 capsid protein with at least about 94% identity to VP1 of AAV clade member No. 0 in Table 2.6. In some embodiments, an AAV clade member encompassed by the disclosure comprises a VP1 capsid protein with at least about 94% identity to VP1 of AAV clade member No. 0 in Table 2.7. In some embodiments, an AAV clade member encompassed by the disclosure comprises a VP1 capsid protein with at least about 94% identity to VP1 of AAV clade member No. 0 in Table 2.8. In some embodiments, an AAV clade member encompassed by the disclosure comprises a VP1 capsid protein with at least about 94% identity to VP1 of AAV clade member No. 0 in Table 2.9. In some embodiments, an AAV clade member encompassed by the disclosure comprises a VP1 capsid protein with at least about 94% identity to VP1 of AAV clade member No. 0 in Table 2.10. In some embodiments, an AAV clade member encompassed by the disclosure comprises a VP1 capsid protein with at least about 94% identity to VP1 of AAV clade member No. 0 in Table 2.11. In some embodiments, an AAV clade member encompassed by the disclosure comprises a VP1 capsid protein with at least about 94% identity to VP1 of AAV clade member No. 0 in Table 2.12. In some embodiments, an AAV clade member encompassed by the disclosure comprises a VP1 capsid protein with at least about 94% identity to VP1 of AAV clade member No. 0 in Table 2.13. In some embodiments, an AAV clade member encompassed by the disclosure comprises a VP1 capsid protein with at least about 94% identity to VP1 of AAV clade member No. 0 in Table 2.14. In some embodiments, an AAV clade member encompassed by the disclosure comprises a VP1 capsid protein with at least about 94% identity to VP1 of AAV clade member No. 0 in Table 2.15. In specific embodiments, an AAV clade member encompassed by the disclosure is not a known AAV capsid.

[0184] In some embodiments, an AAV clade member encompassed by the disclosure comprises a VP1 capsid protein with at least about 95% identity to VP1 of AAV clade member No. 0 in Table 2.6. In some embodiments, an AAV clade member encompassed by the disclosure comprises a VP1 capsid protein with at least about 95% identity to VP1 of AAV clade member No. 0 in Table 2.7. In some embodiments, an AAV clade member encompassed by the disclosure comprises a VP1 capsid protein with at least about 95% identity to VP1 of AAV clade member No. 0 in Table 2.8. In some embodiments, an AAV clade member encompassed by the disclosure comprises a VP1 capsid protein with at least about 95% identity to VP1 of AAV clade member No. 0 in Table 2.9. In some embodiments, an AAV clade member encompassed by the disclosure comprises a VP1 capsid protein with at least about 95% identity to VP1 of AAV clade member No. 0 in Table 2.10. In some embodiments, an AAV clade member encompassed by the disclosure comprises a VP1 capsid protein with at least about 95% identity to VP1 of AAV clade member No. 0 in Table 2.11. In some embodiments, an AAV clade member encompassed by the disclosure comprises a VP1 capsid protein with at least about 95% identity to VP1 of AAV clade member No. 0 in Table 2.12. In some embodiments, an AAV clade member encompassed by the disclosure comprises a VP1 capsid protein with at least about 95% identity to VP1 of AAV clade member No. 0 in Table 2.13. In some embodiments, an AAV clade member encompassed by the disclosure comprises a VP1 capsid protein with at least about 95% identity to VP1 of AAV clade member No. 0 in Table 2.14. In some embodiments, an AAV clade member encompassed by the disclosure comprises a VP1 capsid protein with at least about 95% identity to VP1 of AAV clade member No. 0 in Table 2.15. In specific embodiments, an AAV clade member encompassed by the disclosure is not a known AAV capsid.

[0185] In some embodiments, an AAV clade member encompassed by the disclosure comprises a VP1 capsid protein with at least about 96% identity to VP1 of AAV clade member No. 0 in Table 2.6. In some embodiments, an AAV clade member encompassed by the disclosure comprises a VP1 capsid protein with at least about 96% identity to VP1 of AAV clade member No. 0 in Table 2.7. In some embodiments, an AAV clade member encompassed by the disclosure comprises a VP1 capsid protein with at least about 96% identity to VP1 of AAV clade member No. 0 in Table 2.8. In some embodiments, an AAV clade member encompassed by the disclosure comprises a VP1 capsid protein with at least about 96% identity to VP1 of AAV clade member No. 0 in Table 2.9. In some embodiments, an AAV clade member encompassed by the disclosure comprises a VP1 capsid protein with at least about 96% identity to VP1 of AAV clade member No. 0 in Table 2.10. In some embodiments, an AAV clade member encompassed by the disclosure comprises a VP1 capsid protein with at least about 96% identity to VP1 of AAV clade member No. 0 in Table 2.11. In some embodiments, an AAV clade member encompassed by the disclosure comprises a VP1 capsid protein with at least about 96% identity to VP1 of AAV clade member No. 0 in Table 2.12. In some embodiments, an AAV clade member encompassed by the disclosure comprises a VP1 capsid protein with at least about 96% identity to VP1 of AAV clade member No. 0 in Table 2.13. In some embodiments, an AAV clade member encompassed by the disclosure comprises a VP1 capsid protein with at least about 96% identity to VP1 of AAV clade member No. 0 in Table 2.14. In some embodiments, an AAV clade member encompassed by the disclosure comprises a VP1 capsid protein with at least about 96% identity to VP1 of AAV clade member No. 0 in Table 2.15. In specific embodiments, an AAV clade member encompassed by the disclosure is not a known AAV capsid.

[0186] In some embodiments, an AAV clade member encompassed by the disclosure comprises a VP1 capsid protein with at least about 97% identity to VP1 of AAV clade member No. 0 in Table 2.6. In some embodiments, an AAV clade member encompassed by the disclosure comprises a VP1 capsid protein with at least about 97% identity to VP1 of AAV clade member No. 0 in Table 2.7. In some embodiments, an AAV clade member encompassed by the disclosure comprises a VP1 capsid protein with at least about 97% identity to VP1 of AAV clade member No. 0 in Table 2.8. In some embodiments, an AAV clade member encompassed by the disclosure comprises a VP1 capsid protein with at least about 97% identity to VP1 of AAV clade member No. 0 in Table 2.9. In some embodiments, an AAV clade member encompassed by the disclosure comprises a VP1 capsid protein with at least about 97% identity to VP1 of AAV clade member No. 0 in Table 2.10. In some embodiments, an AAV clade member encompassed by the disclosure comprises a VP1 capsid protein with at least about 97% identity to VP1 of AAV clade member No. 0 in Table 2.11. In some embodiments, an AAV clade member encompassed by the disclosure comprises a VP1 capsid protein with at least about 97% identity to VP1 of AAV clade member No. 0 in Table 2.12. In some embodiments, an AAV clade member encompassed by the disclosure comprises a VP1 capsid protein with at least about 97% identity to VP1 of AAV clade member No. 0 in Table 2.13. In some embodiments, an AAV clade member encompassed by the disclosure comprises a VP1 capsid protein with at least about 97% identity to VP1 of AAV clade member No. 0 in Table 2.14. In some embodiments, an AAV clade member encompassed by the disclosure comprises a VP1 capsid protein with at least about 97% identity to VP1 of AAV clade member No. 0 in Table 2.15. In specific embodiments, an AAV clade member encompassed by the disclosure is not a known AAV capsid.

[0187] In some embodiments, an AAV clade member encompassed by the disclosure comprises a VP1 capsid protein with at least about 98% identity to VP1 of AAV clade member No. 0 in Table 2.6. In some embodiments, an AAV clade member encompassed by the disclosure comprises a VP1 capsid protein with at least about 98% identity to VP1 of AAV clade member No. 0 in Table 2.7. In some embodiments, an AAV clade member encompassed by the disclosure comprises a VP1 capsid protein with at least about 98% identity to VP1 of AAV clade member No. 0 in Table 2.8. In some embodiments, an AAV clade member encompassed by the disclosure comprises a VP1 capsid protein with at least about 98% identity to VP1 of AAV clade member No. 0 in Table 2.9. In some embodiments, an AAV clade member encompassed by the disclosure comprises a VP1 capsid protein with at least about 98% identity to VP1 of AAV clade member No. 0 in Table 2.10. In some embodiments, an AAV clade member encompassed by the disclosure comprises a VP1 capsid protein with at least about 98% identity to VP1 of AAV clade member No. 0 in Table 2.11. In some embodiments, an AAV clade member encompassed by the disclosure comprises a VP1 capsid protein with at least about 98% identity to VP1 of AAV clade member No. 0 in Table 2.12. In some embodiments, an AAV clade member encompassed by the disclosure comprises a VP1 capsid protein with at least about 98% identity to VP1 of AAV clade member No. 0 in Table 2.13. In some embodiments, an AAV clade member encompassed by the disclosure comprises a VP1 capsid protein with at least about 98% identity to VP1 of AAV clade member No. 0 in Table 2.14. In some embodiments, an AAV clade member encompassed by the disclosure comprises a VP1 capsid protein with at least about 98% identity to VP1 of AAV clade member No. 0 in Table 2.15. In specific embodiments, an AAV clade member encompassed by the disclosure is not a known AAV capsid.

[0188] In some embodiments, an AAV clade member encompassed by the disclosure comprises a VP1 capsid protein with at least about 99% identity to VP1 of AAV clade member No. 0 in Table 2.6. In some embodiments, an AAV clade member encompassed by the disclosure comprises a VP1 capsid protein with at least about 99% identity to VP1 of AAV clade member No. 0 in Table 2.7. In some embodiments, an AAV clade member encompassed by the disclosure comprises a VP1 capsid protein with at least about 99% identity to VP1 of AAV clade member No. 0 in Table 2.8. In some embodiments, an AAV clade member encompassed by the disclosure comprises a VP1 capsid protein with at least about 99% identity to VP1 of AAV clade member No. 0 in Table 2.9. In some embodiments, an AAV clade member encompassed by the disclosure comprises a VP1 capsid protein with at least about 99% identity to VP1 of AAV clade member No. 0 in Table 2.10. In some embodiments, an AAV clade member encompassed by the disclosure comprises a VP1 capsid protein with at least about 99% identity to VP1 of AAV clade member No. 0 in Table 2.11. In some embodiments, an AAV clade member encompassed by the disclosure comprises a VP1 capsid protein with at least about 99% identity to VP1 of AAV clade member No. 0 in Table 2.12. In some embodiments, an AAV clade member encompassed by the disclosure comprises a VP1 capsid protein with at least about 99% identity to VP1 of AAV clade member No. 0 in Table 2.13. In some embodiments, an AAV clade member encompassed by the disclosure comprises a VP1 capsid protein with at least about 99% identity to VP1 of AAV clade member No. 0 in Table 2.14. In some embodiments, an AAV clade member encompassed by the disclosure comprises a VP1 capsid protein with at least about 99% identity to VP1 of AAV clade member No. 0 in Table 2.15. In specific embodiments, an AAV clade member encompassed by the disclosure is not a known AAV capsid.

[0189] In a specific embodiment, an AAV capsid member of a novel AAV clade of the disclosure has a VP1 amino acid sequence that is substantially related to a representative amino acid sequence of a novel AAV clade and one or more (e.g., 1, 2, 3, 4, 5, 6, 7, 8 or all) of the variable regions of the VP1 amino acid sequence are identical to the corresponding one or more variable regions of a representative amino acid sequence of the novel AAV clade. In another specific embodiment, an AAV clade member encompassed by the disclosure comprises a VP1 capsid protein with at least about 90% identity to VP1 of AAV clade member No. 0 in any one of Table 2 and one or more (e.g., 1, 2, 3, 4, 5, 6, 7, 8 or all) of the variable regions of the VP1 capsid protein are identical to the corresponding one or more variable regions of clade member 0. In another specific embodiment, an AAV clade member encompassed by the disclosure comprises a VP1 capsid protein with at least about 91% identity to VP1 of AAV clade member No. 0 in any one of Table 2 and one or more (e.g., 1, 2, 3, 4, 5, 6, 7, 8 or all) of the variable regions of the VP1 capsid protein are identical to the corresponding one or more variable regions of clade member 0. In another specific embodiment, an AAV clade member encompassed by the disclosure comprises a VP1 capsid protein with at least about 92% identity to VP1 of AAV clade member No. 0 in any one of Table 2 and one or more (e.g., 1, 2, 3, 4, 5, 6, 7, 8 or all) of the variable regions of the VP1 capsid protein are identical to the corresponding one or more variable regions of clade member 0. In a specific embodiment, an AAV clade member encompassed by the disclosure comprises a VP1 capsid protein with at least about 93% identity to VP1 of AAV clade member No. 0 in any one of Table 2 and one or more (e.g., 1, 2, 3, 4, 5, 6, 7, 8 or all) of the variable regions of the VP1 capsid protein are identical to the corresponding one or more variable regions of clade member 0. In another specific embodiment, an AAV clade member encompassed by the disclosure comprises a VP1 capsid protein with at least about 94% identity to VP1 of AAV clade member No. 0 in any one of Table 2 and one or more (e.g., 1, 2, 3, 4, 5, 6, 7, 8 or all) of the variable regions of the VP1 capsid protein are identical to the corresponding one or more variable regions of clade member 0. In another specific embodiment, an AAV clade member encompassed by the disclosure comprises a VP1 capsid protein with at least about 95% identity to VP1 of AAV clade member No. 0 in any one of Table 2 and one or more (e.g., 1, 2, 3, 4, 5, 6, 7, 8 or all) of the variable regions of the VP1 capsid protein are identical to the corresponding one or more variable regions of clade member 0. In another specific embodiment, an AAV clade member encompassed by the disclosure comprises a VP1 capsid protein with at least about 96% identity to VP1 of AAV clade member No. 0 in any one of Table 2 and one or more (e.g., 1, 2, 3, 4, 5, 6, 7, 8 or all) of the variable regions of the VP1 capsid protein are identical to the corresponding one or more variable regions of clade member 0. In another specific embodiment, an AAV clade member encompassed by the disclosure comprises a VP1 capsid protein with at least about 97% identity to VP1 of AAV clade member No. 0 in any one of Table 2 and one or more (e.g., 1, 2, 3, 4, 5, 6, 7, 8 or all) of the variable regions of the VP1 capsid protein are identical to the corresponding one or more variable regions of clade member 0. In another specific embodiment, an AAV clade member encompassed by the disclosure comprises a VP1 capsid protein with at least about 98% identity to VP1 of AAV clade member No. 0 in any one of Table 2 and one or more (e.g., 1, 2, 3, 4, 5, 6, 7, 8 or all) of the corresponding one or more variable regions of the VP1 capsid protein are identical to the corresponding one or more variable regions of clade member 0. In another specific embodiment, an AAV clade member encompassed by the disclosure comprises a VP1 capsid protein with at least about 99% identity to VP1 of AAV clade member No. 0 in any one of Table 2 and one or more (e.g., 1, 2, 3, 4, 5, 6, 7, 8 or all) of the variable regions of the VP1 capsid protein are identical to the corresponding one or more variable regions of clade member 0.

[0190] In a specific embodiment, an AAV capsid member of a novel AAV clade of the disclosure has an VP1 amino acid sequence that is substantially related to a representative amino acid sequence of a novel AAV clade and one or more (e.g., 1, 2, 3, 4, 5, 6, 7, 8 or all) of VRI-VRIX, and either the GBS, the GH loop or both the GBS and GH loop of the VP1 amino acid sequence are identical to the corresponding one or more (e.g., 1, 2, 3, 4, 5, 6, 7, 8 or all) of VRI-VRIX, and either the GBS, the GH loop or both the GBS and GH loop of a representative amino acid sequence of the novel AAV clade. In another specific embodiment, an AAV clade member encompassed by the disclosure comprises a VP1 capsid protein with at least about 90% identity to VP1 of AAV clade member No. 0 in any one of Table 2 and one or more (e.g., 1, 2, 3, 4, 5, 6, 7, 8 or all) of the variable regions, and either the GBS, the GH loop or both the GBS and GH loop of the VP1 capsid protein are identical to the corresponding one or more variable regions, and either the GBS, the GH loop or both the GBS and GH loop of clade member 0. In another specific embodiment, an AAV clade member encompassed by the disclosure comprises a VP1 capsid protein with at least about 91% identity to VP1 of AAV clade member No. 0 in any one of Table 2 and one or more (e.g., 1, 2, 3, 4, 5, 6, 7, 8 or all) of the variable regions, and either the GBS, the GH loop or both the GBS and GH loop of the VP1 capsid protein are identical to the corresponding one or more variable regions, and either the GBS, the GH loop or both the GBS and GH loop of clade member 0. In another specific embodiment, an AAV clade member encompassed by the disclosure comprises a VP1 capsid protein with at least about 92% identity to VP1 of AAV clade member No. 0 in any one of Table 2 and one or more (e.g., 1, 2, 3, 4, 5, 6, 7, 8 or all) of the variable regions, and either the GBS, the GH loop or both the GBS and GH loop of the VP1 capsid protein are identical to the corresponding one or more variable regions, and either the GBS, the GH loop or both the GBS and GH loop of clade member 0. In a specific embodiment, an AAV clade member encompassed by the disclosure comprises a VP1 capsid protein with at least about 93% identity to VP1 of AAV clade member No. 0 in any one of Table 2 and one or more (e.g., 1, 2, 3, 4, 5, 6, 7, 8 or all) of the corresponding one or more variable regions, and either the GBS, the GH loop or both the GBS and GH loop of the VP1 capsid protein are identical to the corresponding one or more variable regions, and either the GBS, the GH loop or both the GBS and GH loop of clade member 0. In another specific embodiment, an AAV clade member encompassed by the disclosure comprises a VP1 capsid protein with at least about 94% identity to VP1 of AAV clade member No. 0 in any one of Table 2 and one or more (e.g., 1, 2, 3, 4, 5, 6, 7, 8 or all) of the variable regions, and either the GBS, the GH loop or both the GBS and GH loop of the VP1 capsid protein are identical to the corresponding one or more variable regions, and either the GBS, the GH loop or both the GBS and GH loop of clade member 0. In another specific embodiment, an AAV clade member encompassed by the disclosure comprises a VP1 capsid protein with at least about 95% identity to VP1 of AAV clade member No. 0 in any one of Table 2 and one or more (e.g., 1, 2, 3, 4, 5, 6, 7, 8 or all) of the variable regions, and either the GBS, the GH loop or both the GBS and GH loop of the VP1 capsid protein are identical to the corresponding one or more variable regions, and either the GBS, the GH loop or both the GBS and GH loop of clade member 0. In another specific embodiment, an AAV clade member encompassed by the disclosure comprises a VP1 capsid protein with at least about 96% identity to VP1 of AAV clade member No. 0 in any one of Table 2 and one or more (e.g., 1, 2, 3, 4, 5, 6, 7, 8 or all) of the variable regions, and either the GBS, the GH loop or both the GBS and GH loop of the VP1 capsid protein are identical to the corresponding one or more variable regions, and either the GBS, the GH loop or both the GBS and GH loop of clade member 0. In another specific embodiment, an AAV clade member encompassed by the disclosure comprises a VP1 capsid protein with at least about 97% identity to VP1 of AAV clade member No. 0 in any one of Table 2 and one or more (e.g., 1, 2, 3, 4, 5, 6, 7, 8 or all) of the variable regions, and either the GBS, the GH loop or both the GBS and GH loop of the VP1 capsid protein are identical to the corresponding one or more variable regions, and either the GBS, the GH loop or both the GBS and GH loop of clade member 0. In another specific embodiment, an AAV clade member encompassed by the disclosure comprises a VP1 capsid protein with at least about 98% identity to VP1 of AAV clade member No. 0 in any one of Table 2 and one or more (e.g., 1, 2, 3, 4, 5, 6, 7, 8 or all) of the variable regions, and either the GBS, the GH loop or both the GBS and GH loop of the VP1 capsid protein are identical to the corresponding one or more variable regions, and either the GBS, the GH loop or both the GBS and GH loop of clade member 0. In another specific embodiment, an AAV clade member encompassed by the disclosure comprises a VP1 capsid protein with at least about 99% identity to VP1 of AAV clade member No. 0 in any one of Table 2 and one or more (e.g., 1, 2, 3, 4, 5, 6, 7, 8 or all) of the variable regions, and either the GBS, the GH loop or both the GBS and GH loop of the VP1 capsid protein are identical to the corresponding one or more variable regions, and either the GBS, the GH loop or both the GBS and GH loop of clade member 0.

[0191] In certain embodiments, an AAV capsid member of a novel AAV clade of the disclosure has an VP1 amino acid sequence that is substantially related to a representative amino acid sequence of a novel AAV clade, provided that the AAV capsid member is not known in the art. In other words, the present disclosure does not encompass AAV capsid members that are known in the art. For example, AAV VP1 capsid sequences disclosed in any one of Table 2 with a prefix other than “BCD” and VP1 capsid sequences of any of the AAVs listed in Table 4 or Item A or Item B are not encompassed by the present disclosure.

[0192] In certain embodiments, an AAV clade member encompassed by the disclosure comprises a VP1 capsid protein with at least about 90% identity to VP1 of AAV clade member No. 0 in any one of Table 2, provided that the AAV capsid member is not known in the art (e.g., AAV VP1 capsid sequences disclosed in any one of Table 2 with a prefix other than “BCD” and VP1 capsid sequences of any of the AAVs listed in Table 4 or Item A or Item B are not encompassed by the present disclosure). In some embodiments, an AAV clade member encompassed by the disclosure comprises a VP1 capsid protein with at least about 91% identity to VP1 of AAV clade member No. 0 in any one of Table 2, provided that the AAV capsid member is not known in the art (e.g., AAV VP1 capsid sequences disclosed in any one of Table 2 with a prefix other than “BCD” and VP1 capsid sequences of any of the AAVs listed in Table 4 or Item A or Item B are not encompassed by the present disclosure). In certain embodiments, an AAV clade member encompassed by the disclosure comprises a VP1 capsid protein with at least about 92% identity to VP1 of AAV clade member No. 0 of in any one of Table 2, provided that the AAV capsid member is not known in the art (e.g., AAV VP1 capsid sequences disclosed in any one of Table 2 with a prefix other than “BCD” and VP1 capsid sequences of any of the AAVs listed in Table 4 or Item A or Item B are not encompassed by the present disclosure). In some embodiments, an AAV clade member encompassed by the disclosure comprises a VP1 capsid protein with at least about 93% identity to VP1 of AAV clade member No. 0 in any one of Table 2, provided that the AAV capsid member is not known in the art (e.g., AAV VP1 capsid sequences disclosed in any one of Table 2 with a prefix other than “BCD” and VP1 capsid sequences of any of the AAVs listed in Table 4 or Item A or Item B are not encompassed by the present disclosure). In certain embodiments, an AAV clade member encompassed by the disclosure comprises a VP1 capsid protein with at least about 94% identity to VP1 of AAV clade member No. 0 in any one of Table 2, provided that the AAV capsid member is not known in the art (e.g., AAV VP1 capsid sequences disclosed in any one of Table 2 with a prefix other than “BCD” and VP1 capsid sequences of any of the AAVs listed in Table 4 or Item A or Item B are not encompassed by the present disclosure). In some embodiments, an AAV clade member encompassed by the disclosure comprises a VP1 capsid protein with at least about 95% identity to VP1 of AAV clade member No. 0 in any one of Table 2, provided that the AAV capsid member is not known in the art (e.g., AAV VP1 capsid sequences disclosed in any one of Table 2 with a prefix other than “BCD” and VP1 capsid sequences of any of the AAVs listed in Table 4 or Item A or Item B are not encompassed by the present disclosure). In certain embodiments, an AAV clade member encompassed by the disclosure comprises a VP1 capsid protein with at least about 96% identity to VP1 of AAV clade member No. 0 in any one of Table 2, provided that the AAV capsid member is not known in the art (e.g., AAV VP1 capsid sequences disclosed in any one of Table 2 with a prefix other than “BCD” and VP1 capsid sequences of any of the AAVs listed in Table 4 or Item A or Item B are not encompassed by the present disclosure). In some embodiments, an AAV clade member encompassed by the disclosure comprises a VP1 capsid protein with at least about 97% identity to VP1 of AAV clade member No. 0 in any one of Table 2, provided that the AAV capsid member is not known in the art (e.g., AAV VP1 capsid sequences disclosed in any one of Table 2 with a prefix other than “BCD” and VP1 capsid sequences of any of the AAVs listed in Table 4 or Item A or Item B are not encompassed by the present disclosure). In certain embodiments, an AAV clade member encompassed by the disclosure comprises a VP1 capsid protein with at least about 98% identity to VP1 of AAV clade member No. 0 in any one of Table 2, provided that the AAV capsid member is not known in the art (e.g., AAV VP1 capsid sequences disclosed in any one of Table 2 with a prefix other than “BCD” and VP1 capsid sequences of any of the AA Vs listed in Table 4 or Item A or Item B are not encompassed by the present disclosure). In some embodiments, an AAV clade member encompassed by the disclosure comprises a VP1 capsid protein with at least about 99% identity to VP1 of AAV clade member No. 0 in Table 1, provided that the AAV capsid member is not known in the art (e.g., AAV VP1 capsid sequences disclosed in any one of Table 2 with a prefix other than “BCD” and VP1 capsid sequences of any of the AAVs listed in Table 4 or Item A or Item B are not encompassed by the present disclosure).

### 6.3.2.3 Common Variable Regions

[0193] The present disclosure also provides AAV clades grouped based on a common variable region (e.g., VRI-VRIX, GBS, or GH Loop). In some embodiments, an AAV member of a novel AAV clade of the disclosure has one or more common variable regions. That is, the amino acid sequences of one or more common variable regions across the viral capsid protein(s) (e.g., VP1, VP2, or VP3), such that the variable regions have substantial sequence similarity or identity between the AAV clade members.

[0194] In some embodiments, a member of a novel AAV clade of the disclosure has a common variable region(s) (e.g., VRI-VRIX, GBS, or GH Loop) if there is about 90% to 99% similarity between the variable region(s) of the viral capsid protein(s) (e.g., VP1, VP2, or VP3) of the AAV clade member and the variable region(s) of the viral capsid protein(s) (e.g., VP1, VP2, or VP3) of another AAV clade member (e.g., AAV clade member No. 0 in any one of Table 2) using a technique described herein (e.g., ClustalW) or known to one of skill in the art. In some embodiments, a member of a novel AAV clade of the disclosure has a common variable region(s) (e.g., VRI-VRIX, GBS, or GH Loop) if there is about 90% similarity between the variable region(s) of the viral capsid protein(s) (e.g., VP1, VP2, or VP3) of the AAV clade member and the variable region(s) of the viral capsid protein(s) (e.g., VP1, VP2, or VP3) of another AAV clade member (e.g., AAV clade member No. 0 in any one of Table 2) using a technique described herein (e.g., ClustalW) or known to one of skill in the art. In some embodiments, a member of a novel AAV clade of the disclosure has a common variable region(s) (e.g., VRI-VRIX, GBS, or GH Loop) if there is about 91% similarity between the variable region(s) of the viral capsid protein(s) (e.g., VP1, VP2, or VP3) of the AAV clade member and the variable region(s) of the viral capsid protein(s) (e.g., VP1, VP2, or VP3) of another AAV clade member (e.g., AAV clade member No. 0 in any one of Table 2) using a technique described herein (e.g., ClustalW) or known to one of skill in the art. In some embodiments, a member of a novel AAV clade of the disclosure has a common variable region(s) (e.g., VRI-VRIX, GBS, or GH Loop) if there is about 92% similarity between the variable region(s) of the viral capsid protein(s) (e.g., VP1, VP2, or VP3) of the AAV clade member and the variable region(s) of the viral capsid protein(s) (e.g., VP1, VP2, or VP3) of another AAV clade member (e.g., AAV clade member No. 0 in any one of Table 2) using a technique described herein (e.g., ClustalW) or known to one of skill in the art. In some embodiments, a member of a novel AAV clade of the disclosure has a common variable region(s) (e.g., VRI-VRIX, GBS, or GH Loop) if there is about 93% similarity between the variable region(s) of the viral capsid protein(s) (e.g., VP1, VP2, or VP3) of the AAV clade member and the variable region(s) of the viral capsid protein(s) (e.g., VP1, VP2, or VP3) of another AAV clade member (e.g., AAV clade member No. 0 in any one of Table 2) using a technique described herein (e.g., ClustalW) or known to one of skill in the art. In some embodiments, a member of a novel AAV clade of the disclosure has a common variable region(s) (e.g., VRI-VRIX, GBS, or GH Loop) if there is about 94% similarity between the variable region(s) of the viral capsid protein(s) (e.g., VP1, VP2, or VP3) of the AAV clade member and the variable region(s) of the viral capsid protein(s) (e.g., VP1, VP2, or VP3) of another AAV clade member (e.g., AAV clade member No. 0 in any one of Table 2) using a technique described herein (e.g., ClustalW) or known to one of skill in the art. In some embodiments, a member of a novel AAV clade of the disclosure has a common variable region(s) (e.g., VRI-VRIX, GBS, or GH Loop) if there is about 95% similarity between the variable region(s) of the viral capsid protein(s) (e.g., VP1, VP2, or VP3) of the AAV clade member and the variable region(s) of the viral capsid protein(s) (e.g., VP1, VP2, or VP3) of another AAV clade member (e.g., AAV clade member No. 0 in any one of Table 2) using a technique described herein (e.g., ClustalW) or known to one of skill in the art. In some embodiments, a member of a novel AAV clade of the disclosure has a common variable region(s) (e.g., VRI-VRIX, GBS, or GH Loop) if there is about 96% similarity between the variable region(s) of the viral capsid protein(s) (e.g., VP1, VP2, or VP3) of the AAV clade member and the variable region(s) of the viral capsid protein(s) (e.g., VP1, VP2, or VP3) of another AAV clade member (e.g., AAV clade member No. 0 in any one of Table 2) using a technique described herein (e.g., ClustalW) or known to one of skill in the art. In some embodiments, a member of a novel AAV clade of the disclosure has a common variable region(s) (e.g., VRI-VRIX, GBS, or GH Loop) if there is about 97% similarity between the variable region(s) of the viral capsid protein(s) (e.g., VP1, VP2, or VP3) of the AAV clade member and the variable region(s) of the viral capsid protein(s) (e.g., VP1, VP2, or VP3) of another AAV clade member (e.g., AAV clade member No. 0 in any one of Table 2) using a technique described herein (e.g., ClustalW) or known to one of skill in the art. In some embodiments, a member of a novel AAV clade of the disclosure has a common variable region(s) (e.g., VRI-VRIX, GBS, or GH Loop) if there is about 98% similarity between the variable region(s) of the viral capsid protein(s) (e.g., VP1, VP2, or VP3) of the AAV clade member and the variable region(s) of the viral capsid protein(s) (e.g., VP1, VP2, or VP3) of another AAV clade member (e.g., AAV clade member No. 0 in any one of Table 2) using a technique described herein (e.g., ClustalW) or known to one of skill in the art. In some embodiments, a member of a novel AAV clade of the disclosure has a common variable region(s) (e.g., VRI-VRIX, GBS, or GH Loop) if there is about 99% similarity between the variable region(s) of the viral capsid protein(s) (e.g., VP1, VP2, or VP3) of the AAV clade member and the variable region(s) of the viral capsid protein(s) (e.g., VP1, VP2, or VP3) of another AAV clade member (e.g., AAV clade member No. 0 in any one of Table 2) using a technique described herein (e.g., ClustalW) or known to one of skill in the art.

[0195] In some embodiments, a member of a novel AAV clade of the disclosure has a common variable region(s) (e.g., VRI-VRIX, GBS, or GH Loop) if there is about 90% to 99% identity between the variable region(s) of the viral capsid protein(s) (e.g., VP1, VP2, or VP3) of the AAV clade member and the variable region(s) of the viral capsid protein(s) (e.g., VP1, VP2, or VP3) of another AAV clade member (e.g., AAV clade member No. 0 in any one of Table 2) using a technique described herein (e.g., ClustalW) or known to one of skill in the art. In some embodiments, a member of a novel AAV clade of the disclosure has a common variable region(s) (e.g., VRI-VRIX, GBS, or GH Loop) if there is about 90% identity between the variable region(s) of the viral capsid protein(s) (e.g., VP1, VP2, or VP3) of the AAV clade member and the variable region(s) of the viral capsid protein(s) (e.g., VP1, VP2, or VP3) of another AAV clade member (e.g., AAV clade member No. 0 in any one of Table 2) using a technique described herein (e.g., ClustalW) or known to one of skill in the art. In some embodiments, a member of a novel AAV clade of the disclosure has a common variable region(s) (e.g., VRI-VRIX, GBS, or GH Loop) if there is about 91% identity between the variable region(s) of the viral capsid protein(s) (e.g., VP1, VP2, or VP3) of the AAV clade member and the variable region(s) of the viral capsid protein(s) (e.g., VP1, VP2, or VP3) of another AAV clade member (e.g., AAV clade member No. 0 in any one of Table 2) using a technique described herein (e.g., ClustalW) or known to one of skill in the art. In some embodiments, a member of a novel AAV clade of the disclosure has a common variable region(s) (e.g., VRI-VRIX, GBS, or GH Loop) if there is about 92% identity between the variable region(s) of the viral capsid protein(s) (e.g., VP1, VP2, or VP3) of the AAV clade member and the variable region(s) of the viral capsid protein(s) (e.g., VP1, VP2, or VP3) of another AAV clade member (e.g., AAV clade member No. 0 in any one of Table 2) using a technique described herein (e.g., ClustalW) or known to one of skill in the art. In some embodiments, a member of a novel AAV clade of the disclosure has a common variable region(s) (e.g., VRI-VRIX, GBS, or GH Loop) if there is about 93% identity between the variable region(s) of the viral capsid protein(s) (e.g., VP1, VP2, or VP3) of the AAV clade member and the variable region(s) of the viral capsid protein(s) (e.g., VP1, VP2, or VP3) of another AAV clade member (e.g., AAV clade member No. 0 in any one of Table 2) using a technique described herein (e.g., ClustalW) or known to one of skill in the art. In some embodiments, a member of a novel AAV clade of the disclosure has a common variable region(s) (e.g., VRI-VRIX, GBS, or GH Loop) if there is about 94% identity between the variable region(s) of the viral capsid protein(s) (e.g., VP1, VP2, or VP3) of the AAV clade member and the variable region(s) of the viral capsid protein(s) (e.g., VP1, VP2, or VP3) of another AAV clade member (e.g., AAV clade member No. 0 in any one of Table 2) using a technique described herein (e.g., ClustalW) or known to one of skill in the art. In some embodiments, a member of a novel AAV clade of the disclosure has a common variable region(s) (e.g., VRI-VRIX, GBS, or GH Loop) if there is about 95% identity between the variable region(s) of the viral capsid protein(s) (e.g., VP1, VP2, or VP3) of the AAV clade member and the variable region(s) of the viral capsid protein(s) (e.g., VP1, VP2, or VP3) of another AAV clade member (e.g., AAV clade member No. 0 in any one of Table 2) using a technique described herein (e.g., ClustalW) or known to one of skill in the art. In some embodiments, a member of a novel AAV clade of the disclosure has a common variable region(s) (e.g., VRI-VRIX, GBS, or GH Loop) if there is about 96% identity between the variable region(s) of the viral capsid protein(s) (e.g., VP1, VP2, or VP3) of the AAV clade member and the variable region(s) of the viral capsid protein(s) (e.g., VP1, VP2, or VP3) of another AAV clade member (e.g., AAV clade member No. 0 in any one of Table 2) using a technique described herein (e.g., ClustalW) or known to one of skill in the art. In some embodiments, a member of a novel AAV clade of the disclosure has a common variable region(s) (e.g., VRI-VRIX, GBS, or GH Loop) if there is about 97% identity between the variable region(s) of the viral capsid protein(s) (e.g., VP1, VP2, or VP3) of the AAV clade member and the variable region(s) of the viral capsid protein(s) (e.g., VP1, VP2, or VP3) of another AAV clade member (e.g., AAV clade member No. 0 in any one of Table 2) using a technique described herein (e.g., ClustalW) or known to one of skill in the art. In some embodiments, a member of a novel AAV clade of the disclosure has a common variable region(s) (e.g., VRI-VRIX, GBS, or GH Loop) if there is about 98% identity between the variable region(s) of the viral capsid protein(s) (e.g., VP1, VP2, or VP3) of the AAV clade member and the variable region(s) of the viral capsid protein(s) (e.g., VP1, VP2, or VP3) of another AAV clade member (e.g., AAV clade member No. 0 in any one of Table 2) using a technique described herein (e.g., ClustalW) or known to one of skill in the art. In some embodiments, a member of a novel AAV clade of the disclosure has a common variable region(s) (e.g., VRI-VRIX, GBS, or GH Loop) if there is about 99% identity between the variable region(s) of the viral capsid protein(s) (e.g., VP1, VP2, or VP3) of the AAV clade member and the variable region(s) of the viral capsid protein(s) (e.g., VP1, VP2, or VP3) of another AAV clade member (e.g., AAV clade member No. 0 in any one of Table 2) using a technique described herein (e.g., ClustalW) or known to one of skill in the art.

[0196] In some embodiments, the variable regions of a capsid protein (e.g., VP1, VP2, or VP3) can be determined by a multiple sequence alignment of the amino acid sequence with a capsid viral protein (e.g., VP1, VP2, or VP3) of unrelated or related AAV capsid. For example, the variable regions spanning the VP1 capsid protein of AAV-9 can be identified by comparing it to the VP1 capsid proteins of AAV-2 or AAV-4; such a multiple sequence alignment will determine the variable regions (amino acid residues that vary) in the AAV9 VP1 capsid viral protein relative to AAV-2 and AAV-4.

[0197] In other embodiments, the variable regions of a capsid protein (e.g., VP1, VP2, or VP3) can be determined by structural alignment with the SSM (Secondary Structure Matching) program. See Krissinel E, Henrick K. Secondary-structure matching (SSM), a tool for fast protein structure alignment in three dimensions. Acta Crystallogr D Biol Crystallogr. 2004 December; 60 (Pt 12 Pt 1): 2256-68. doi: 10.1107/S0907444904026460, which is incorporated herein by reference in its entirety. For example, the crystal structure of a novel AAV capsid viral protein (VP) can be determined and compared to the VPs of AAVs such as AAV-2, AAV-3b, AAV-4, AAV-6, or AAV-8, for which high-resolution crystal structures are available. The crystal structure of an AAV capsid protein can be determined using cryo-EM (X-ray crystallography) or cryo-reconstruction. In some embodiments, clade-specific loop conformations are used as determined an AAV clade, as disclosed in Mietzsch M, et al. Viruses. 2021; 13 (1): 101. doi.org/10.3390/v13010101, which is incorporated herein by reference in its entirety.

[0198] In a specific embodiment, the location of the variable regions of a novel AAV capsid VP1 protein can be identified as described in Table 8, Example 9. In certain embodiments, the location of the N-terminal and/or C-terminal ends of the variable regions may vary by from up to 1 amino acid, 2 amino acids, 3 amino acids, 4 amino acids or 5 amino acids from the amino acid locations of the determined variable regions.

### 6.3.2.4 Phylogeny

[0199] The present disclosure also provides AAV clades of AAV isolates (i.e., AAV members) grouped by their VP1 phylogenetic similarity. Also, provided are distinct AAV clades comprising AAV members with VP1 capsid sequences that are phylogenetically unrelated. In some embodiments, an AAV clade comprises one AAV member. In other embodiments, an AAV clade comprises at least two AAV members. Examples of phylogenetically related and distinct AAV clades of the disclosure are provided in FIGS. 3-13.

[0200] The phylogeny of an AAV VP1 amino acid sequence can be determined by a multiple sequence alignment with an VP1 capsid protein using an alignment program such as Clustal (e.g., Clustal W) or the like. Other nonlimiting multiple sequence alignment programs for amino acid sequences that can be used are, “MAP”, “PIMA”, “MSA”, “BLOCKMAKER”, “MEME”, and “Match-Box” programs. Generally, any of these programs are used at default settings, although one of skill in the art can alter these settings as needed. Alternatively, one can use any other algorithm or computer program which provides at least the percent identity or alignment as that provided by the referenced algorithms and programs. See, e.g., J. D. Thomson et al, Nucl. Acids. Res., “A comprehensive comparison of multiple sequence alignments”, 27 (13): 2682-2690 (1999).

[0201] After the multiple sequence alignment is performed, the genetic distance for the phylogenetic trees are generated using Neighbor-Joining or UPGMA method using bioinformatics software such Geneious Prime or the like, and selecting an appropriate genetic distance model such as, Jukes-Cantor. The phylogeny of an AAV VP1 amino acid sequence, if it is phylogenetically related to a novel AAV clade of the disclosure, is determined by such phylogenetic output. Examples of phylogenetically AAV clades and AAV branches of the disclosure are provided in FIGS. 3-14.

[0202] The genetic distances of AAV clades of the disclosure are provided in Table 3. The mean, min, and max genetic distance as compared to AAV members within the same AAV clade, with other AAV clades within the same AAV branch, or with other AAV clades in unrelated AAV branches are provided in Table 3 below.

TABLE 3
Genetic distances of Novel AAV Clades and AAV Branches
Genetic distances of AAV Clades and AAV Branches (mean, min and max)

| | | | | | Mean | | | | | |
|---|---|---|---|---|---|---|---|---|---|---|
| | | | | | to | Min to | Max to | | | |
| | | | | | Other | Other | Other | | | |
| | | Mean | Min | Max | Clades | Clades | Clades | Mean to | Min to | Max to |
| | | within | Within | Within | within | within | within | Other | Other | Other |
| AAV | AAV | the | the | the | the | the | the | Clades in | Clades in | Clades in |
| Clade | Branch | same | same | same | Same | Same | Same | Other | Other | Other |
| No. | No. | Clade | Clade | Clade | Branch | Branch | Branch | Branches | Branches | Branches |
| 0 | 2 | 0.019 | 0.000 | 0.093 | 0.186 | 0.110 | 0.238 | 0.349 | 0.287 | 0.493 |
| 1 | 2 | 0.066 | 0.000 | 0.126 | 0.167 | 0.072 | 0.221 | 0.350 | 0.276 | 0.503 |
| 4 | 2 | 0.051 | 0.001 | 0.081 | 0.203 | 0.156 | 0.238 | 0.340 | 0.234 | 0.500 |
| 6 | 2 | 0.060 | 0.000 | 0.094 | 0.156 | 0.092 | 0.206 | 0.346 | 0.273 | 0.497 |
| 11 | 2 | 0.009 | 0.001 | 0.018 | 0.171 | 0.072 | 0.220 | 0.356 | 0.302 | 0.503 |
| 12 | 2 | 0.029 | 0.011 | 0.044 | 0.161 | 0.069 | 0.192 | 0.349 | 0.288 | 0.493 |
| 13 | 2 | 0.011 | 0.003 | 0.020 | 0.182 | 0.121 | 0.214 | 0.347 | 0.301 | 0.499 |
| 16 | 2 | 0.016 | 0.008 | 0.022 | 0.162 | 0.113 | 0.197 | 0.347 | 0.276 | 0.496 |
| 21 | 2 | 0.050 | 0.000 | 0.083 | 0.156 | 0.069 | 0.189 | 0.345 | 0.284 | 0.490 |
| 22 | 2 | 0.003 | 0.003 | 0.003 | 0.163 | 0.108 | 0.221 | 0.345 | 0.294 | 0.490 |

[0203] In some embodiments, an AAV clade comprises at least two AAV members, wherein each AAV member is phylogenetically related as determined by comparing its VP1 amino acid sequence using the Neighbor-joining method, wherein the VP1 amino acid sequence of an AAV member and has a genetic distance (i.e., mean, min, or max genetic distance within a clade) provided in Table 3 to the VP1 amino acid sequence of each other AAV member. In certain embodiments, at least one AAV member of the AAV clade comprises a VP1 amino acid sequence of any one of SEQ ID NOs: 1-180 and 361-362.

### Novel AAV Branches

[0204] In addition to novel AAV clades, the present disclosure also provides novel AAV branches (i.e., a group of different AAV clades) based on common phylogeny (e.g., genetic distance or capsid sequence identity) and/or common function. In some embodiments, the AAV branch is defined by min, max, and average genetic distance as described in Table 3. In some embodiments, the AAV branch is defined by the AAV clades profile to evade neutralization by human serum (i.e., evading AAV humoral immunity). See, e.g., Example 4 and FIGS. 14A-B. In some embodiments, the AAV branch is defined by the genetic distance and the profile of evading AAV humoral immunity.

[0205] In some embodiments, provided herein are branches of AAV capsid sequences that are phylogenetically related. In some embodiments, an AAV branch comprises at least two AAV members, wherein each AAV member is phylogenetically related as determined by comparing its VP1 amino acid sequence using the Neighbor joining method, wherein the VP1 amino acid sequence of an AAV member and has a genetic distance (i.e., mean or a range min or max genetic distance as other clades in the same branch) provided in Table 3. In some embodiments, at least one AAV member of the AAV branch comprises a VP1 amino acid sequence of any one of SEQ ID NOs: 1-180 and 361-362.

[0206] In specific embodiments, an adeno-associated virus (AAV) branch, comprises at least two AAV members, wherein each AAV member is phylogenetically related as determined by comparing its VP1 amino acid sequence using the Neighbor joining method, wherein the VP1 amino acid sequence of an AAV member has at least 40% identity to the VP1 amino acid sequence of each other AAV member, and wherein at least one AAV member of AAV branch comprises a VP1 amino acid sequence of No. 0 in Table 2. In certain embodiments, each AAV member of an AAV branch comprises one or more variable region(s) (e.g., 1, 2, 3, 4, 5, 6, 7, 8 or 9) of the VP1 amino acid sequence that is identical to the corresponding one or more variable region(s) of the VP1 amino acid sequence of No. 0 in Table 2. In some embodiments, each AAV member of an AAV branch comprises a GBS, GH loop, or both a GBS and GH loop of the VP1 amino acid sequence that is identical to the GBS, the GH loop, or both the GBS and GH loop of the VP1 amino acid sequence of No. 0 in Table 2. In certain embodiments, each AAV member of an AAV branch comprises one or more (e.g., 1, 2, 3, 4, 5, 6, 7, 8 or all) of VRI-VRIX and either the GBS, the GH loop, or both the GBS and GH loop of the VP1 amino acid sequence that is identical to the corresponding one or more (e.g., 1, 2, 3, 4, 5, 6, 7, 8 or all) of VRI-VRIX and either the GBS, the GH loop, or both the GBS and GH loop of the VP1 amino acid sequence of No. 0 in Table 2.

### 6.3.2.5 Tropism

[0207] Upon reviewing the present disclosure, it will be readily apparent to one of skilled in the art that certain novel AAV clades, AAV branches, and/or individual AAV capsid sequences of the disclosure are particularly useful as rAAV-based vectors and/or rAAV viral particles for certain biomedical applications based on their cell/tissue specificity, e.g., tropism.

[0208] For example, viral particles made using the novel AAV sequence(s) of a clade are useful for delivering a biomolecule (e.g., a therapeutic biomolecule) or agent to muscle tissue, including the heart muscle. While viral particles made using AAV capsid sequence(s) of a different clade are useful for delivering a biomolecule (e.g., a therapeutic biomolecule) or agent to the liver, brain or CNS. Uses of such of novel AAV sequences comprising the clade are not limited and one of skill in the art may utilize these for delivery to other cell types, tissues, or organs.

[0209] In some embodiments, a novel rAAV viral particle of the disclosure has similar or comparable tropism for a cell type or tissue as compared to a reference AAV. In some embodiments, a novel rAAV viral particle of the disclosure has enhanced/increased tropism for a cell type or tissue as compared to a reference AAV. The reference AAV may be a naturally occurring AAV serotype (e.g., AAV-1, AAV-2, AAV-3, AAV-4, AAV-5, AAV-6, AAV-7, AAV-8, AAV-9, AAV-10, AAV-rh10, AAV-11, AAV-12, or AAV-13). Alternatively, the reference AAV may be a known AAV comprising a chimeric, engineered, or hybrid capsid. In some embodiments, the reference AAV is one described in the Examples, infra. In some embodiments, the reference AAV is AAVrh.8, AAVrh.10, AAVrh.39, AAVrh.43, or AAV-9. In instances where a novel rAAV viral particle comprises a modified AAV capsid sequence (such as described in Section 6.3.1.4, supra), a novel rAAV viral particle with the corresponding unmodified AAV capsid sequence may be used as a reference AAV. In addition, a reference AAV may be one novel rAAV viral particle of the disclosure compared to another novel viral particle of the disclosure.

[0210] In some embodiments, a novel rAAV viral particle of the disclosure has tropism for a cell or tissue from the CNS, heart, lung, trachea, esophagus, muscle, bone, cartilage, stomach, pancreas, intestine, liver, bladder, kidney, ureter, urethra, uterus, fallopian tube, ovary, testes, prostate, eye, blood, lymph, or oral mucosa. In certain embodiments, a novel rAAV viral particle of the disclosure has tropism for a muscle cell (e.g., skeletal muscle cell, smooth muscle cell, diaphragm muscle cell, and/or cardiac muscle cell) or muscle tissue (e.g., skeletal muscle, smooth muscle, diaphragm muscle, and/or cardiac muscle). In some embodiments, a novel rAAV viral particle of the disclosure has tropism for a liver cell or liver tissue. In some embodiments, a novel rAAV viral particle of the disclosure has tropism for an ear cell or ear tissue. In certain embodiments, a novel rAAV viral particle of the disclosure has tropism for a spinal cord cell or spinal cord tissue. In some embodiments, a novel rAAV viral particle of the disclosure has tropism for a CNS cell or CNS tissue (e.g., including brain tissues). In certain embodiments, a novel rAAV viral particle of the disclosure has tropism for one, two or more of the following cells: neurons, glial cells, astrocytes, oligodendroglia, microglia, Schwann cells, ependymal cells, stellate fat storing cells, Kupffer cells, hepatocytes, liver endothelial cells, ocular cells, epithelial cells, cardiomyocytes, smooth muscle cells, pancreatic cells, lung cells, T-cells, B cells, hematopoietic stem cells, and embryonic stem cells. In a specific embodiment, biodistribution of a novel rAAV viral particle of the disclosure is assessed using a technique known to one of skill in the art or described herein (e.g., in the Examples (e.g., Example 6 or 7), infra). In another specific embodiment, the distribution in brain tissue of a novel rAAV viral particle of the disclosure is assessed using a technique known to one of skill in the art or described herein (e.g., in the Examples (e.g., Example 8 or 11), infra).

[0211] In some embodiments, a novel rAAV viral particle of the disclosure has enhanced muscle tropism (e.g., human skeletal muscle tropism or smooth muscle tropism) as compared to a reference AAV (e.g., AAV-1, AAV-6, AAV-7, AAV-8, AAV-9, or AAV-rh.10). In other embodiments, a novel rAAV viral particle of the disclosure has similar or comparable muscle tropism (e.g., human skeletal muscle tropism or smooth muscle tropism) as compared to a reference AAV (e.g., AAV-1, AAV-6, AAV-7, AAV-8, AAV-9 or AAV-rh.10). In certain embodiments, a novel rAAV viral particle of the disclosure has enhanced central nervous system (CNS) tropism as compared to a reference AAV (e.g., AAV-1, AAV-4, AAV-5, AAV-6, AAV-9, AAV-9-PHP.eB, or AAV-rh. 10). In other embodiments, a novel rAAV viral particle of the disclosure has similar or comparable central nervous system (CNS) tropism as compared to a reference AAV (e.g., AAV-1, AAV-4, AAV-5, AAV-6, AAV-9, AAV-9-PHP.eB, or AAV-rh10). In some embodiments, a novel rAAV viral particle of the disclosure has enhanced brain tropism as compared to a reference AAV (e.g., AAVrh.8, AAVrh. 10, AAVrh.39, AAVrh.43, AAV-9, or AAV-9-PHP.eB). In other embodiments, a novel AAV of the disclosure has similar or comparable brain tropism as compared to a reference AAV (e.g., AAVrh.8, AAVrh. 10, AAVrh.39, AAVrh.43, AAV-9, or AAV-9-PHP.eB). In certain embodiments, a novel AAV of the disclosure has enhanced heart tropism as compared to a reference AAV (e.g., AAV-2, AAV-3, AAV-6, AAV-7, AAV-8, AAV-9, or AAV-rh. 10). In other embodiments, a novel AAV of the disclosure has similar or comparable heart tropism as compared to a reference AAV (e.g., AAV-2, AAV-3, AAV-6, AAV-7, AAV-8, AAV-9, or AAV-rh.10). In certain embodiments, a novel AAV of the disclosure has enhanced liver tropism as compared to a reference AAV (e.g., AAV-2, AAV-3, AAV-5, AAV-6, AAV-7, AAV-8, AAV-9, or AAV-rh.10). In other embodiments, a novel AAV of the disclosure has similar or comparable liver tropism as compared to a reference AAV (e.g., AAV-2, AAV-3, AAV-5, AAV-6, AAV-7, AAV-8, AAV-9, or AAV-rh. 10). In other embodiments, a novel AAV of the disclosure has lower liver tropism as compared to a reference AAV (e.g., AAV-2, AAV-3, AAV-6, AAV-5, AAV-7, AAV-8, AAV-9, or AAV-rh10). In some embodiments, novel AAV of the disclosure has similar or comparable ear tropism as compared to a reference AAV (e.g., AAV-2, AAV-3, AAV-6, AAV-7, AAV-8, AAV-9, AAV-9-PHP.B or AAV-rh10). In other embodiments, a novel AAV of the disclosure has similar or comparable ear tropism as compared to a reference AAV (e.g., AAV-2, AAV-3, AAV-6, AAV-7, AAV-8, AAV-9, AAV-9-PHP.B or AAV-rh10). The tropism may be assessed by a technique described herein (e.g., in the Examples, infra) or one known to one of skill in the art. In certain embodiments, a novel AAV of the disclosure has enhanced cancer tropism as compared to a reference AAV (e.g., AAV-2, AAV-3, AAV-6, AAV-7, AAV-8, AAV-9, or AAV-rh10). In other embodiments, a novel AAV of the disclosure has similar or comparable cancer tropism as compared to a reference AAV (e.g., AAV-2, AAV-3, AAV-6, AAV-7, AAV-8, AAV-9, or AAV-rh10). In some embodiments, the capsid is one referenced in the Examples, infra. In some embodiments, the capsid protein is a BCD_0126, BCD_0282, BCD_0176, BCD_0446, BCD_0160, BCD_0195, BCD_0180, BCD_0192, BCD_0185, BCD_0454, BCD_0277, BCD_0174, BCD_0167, BCD_0126, BCD_0125, BCD_0193, BCD_0286, BCD_0182, BCD_0283, BCD_0106, or BCD_0361 capsid protein.

[0212] In some embodiments, a novel rAAV viral particle of the disclosure has about 5%, 10%, 15%, 20%, 25%, 30%, 35%, 40%, 45%, or 50% greater tropism for a particular cell type or tissue as compared to a reference AAV. In some embodiments, a novel rAAV viral particle of the disclosure has at least about 5%, 10%, 15%, 20%, 25%, 30%, 35%, 40%, 45%, or 50% greater tropism for a particular cell type or tissue as compared to a reference AAV. In some embodiments, a novel rAAV viral particle of the disclosure has about 55%, 60%, 65%, 70%, 75%, 80%, 85%, 90%, 95%, 99%, or 100% greater tropism for a particular cell type or tissue as compared to a reference AAV. In some embodiments, a novel rAAV viral particle of the disclosure has at least about 55%, 60%, 65%, 70%, 75%, 80%, 85%, 90%, 95%, 99%, or 100% greater tropism for a particular cell type or tissue as compared to a reference AAV. In some embodiments, a novel rAAV viral particle of the disclosure has about 125%, 150%, 175%, 200%, 250%, 300%, 350%, 400%, or 500% greater tropism for a particular cell type or tissue as compared to a reference AAV. In some embodiments, a novel rAAV viral particle of the disclosure has at least about 125%, 150%, 175%, 200%, 250%, 300%, 350%, 400%, or 500% greater tropism for a particular cell type or tissue as compared to a reference AAV.

[0213] In some embodiments, a novel rAAV viral particle of the disclosure has 5% to 25%, 15% to 30%, 25% to 50%, or 40%, to 50% greater tropism for a particular cell type or tissue as compared to a reference AAV. In certain embodiments, a novel rAAV viral particle of the disclosure has 55% to 75%, 70% to 85%, 75% to 95%, 90% to 99%, or 75%, to 100% greater tropism for a particular cell type or tissue as compared to a reference AAV. In some embodiments, a novel rAAV viral particle of the disclosure has about 125% to 200%, 200% to 250%, 150% to 300%, 200% to 400%, 250% to 500%, or 400% to 500% greater tropism for a particular cell type or tissue as compared to a reference AAV. In a specific embodiment, the tropism for a particular cell type or tissue is assessed using a technique known to one of skill in the art or described herein. In some embodiments, the cell type or tissue is muscle. In some embodiments, the cell type or tissue is muscle and the reference AAV is AAV-1, AAV-6, AAV-7, AAV-8, AAV-9, or AAV-rh.10. In some embodiments, the cell type or tissue is heart. In some embodiments, the cell type or tissue is heart and the reference AAV is AAV-1, AAV-6, AAV-7, AAV-8, AAV-9, or AAV-rh.10. In some embodiments, the cell type or tissue is brain. In some embodiments, the cell type or tissue is brain and the reference AAV is AAVrh.8, AAVrh. 10, AAVrh.39, AAVrh.43, or AAV-9. In some embodiments, the cell type is a neuron. In some embodiments, the cell type is a neuron and the reference AAV is AAVrh.8, AAVrh.10, AAVrh.39, AAVrh.43, AAV-9, or AAV-9-PHP.eB. In some embodiments, the cell type or tissue is ear. In some embodiments, the cell type or tissue is ear and the reference AAV is AAV-2, AAV-3, AAV-6, AAV-7, AAV-8, AAV-9, AAV-9-PHP.B or AAV-rh10. In some embodiments, the cell type or tissue is plasma. In some embodiments, the cell type or tissue is plasma and the reference AAV is AAV-2, AAV-3, AAV-6, AAV-7, AAV-8, AAV-9, or AAV-rh10. In some embodiments, the cell type or tissue is kidney. In some embodiments, the cell type or tissue is kidney and the reference AAV is AAV-2, AAV-3, AAV-6, AAV-7, AAV-8, AAV-9, or AAV-rh10. In some embodiments, the cell type or tissue is liver. In some embodiments, the cell type or tissue is liver and the reference AAV is AAV-2, AAV-3, AAV-5. AAV-6, AAV-7, AAV-8, AAV-9, or AAV-rh.10. In some embodiments, the cell type or tissue is ear. In some embodiments, the cell type or tissue is ear and the reference AAV is AAV-2, AAV-3, AAV-6, AAV-7, AAV-8, AAV-9, AAV-9-PHP.B, or AAV-rh.10.

[0214] In some embodiments, a novel rAAV viral particle of the disclosure with increased tropism for a particular cell type or tissue as compared to a reference AAV has increased expression of a gene product encoded by a transgene incorporated into the novel rAAV viral particle as compared to the expression of the same gene product encoded by the same transgene incorporated into the reference AAV. In certain embodiments, the expression of the gene product encoded by the transgene incorporated into the novel rAAV viral particle is 5% to 25%, 15% to 30%, 25% to 50%, or 40%, to 50% greater than the expression of the same gene product encoded by the same transgene incorporated into the reference AAV. In some embodiments, the expression of the gene product encoded by the transgene incorporated into the novel rAAV viral particle is 55% to 75%, 70% to 85%, 75% to 95%, 90% to 99%, or 75%, to 100% greater than the expression of the same gene product encoded by the same transgene incorporated into the reference AAV. In certain embodiments, the expression of the gene product encoded by the transgene incorporated into the novel rAAV viral particle is 125% to 200%, 200% to 250%, 150% to 300%, 200% to 400%, 250% to 500%, or 400% to 500% greater than the expression of the same gene product encoded by the same transgene incorporated into the reference AAV. In some embodiments, the expression of a gene product is measured at the RNA level by a technique known to one of skill in the art (e.g., Northern blot, RT-PCR, etc.) or described herein. In certain embodiments, the expression of a gene product is measured at the protein level by a technique known to one of skill in the art (e.g., Western blot, ELISA, or another immunoassay) or described herein. In some embodiments, the cell type or tissue is muscle. In some embodiments, the cell type or tissue is muscle and the reference AAV is AAV-1, AAV-6, AAV-7, AAV-8, AAV-9, or AAV-rh10. In some embodiments, the cell type or tissue is heart. In some embodiments, the cell type or tissue is heart and the reference AAV is AAV-1, AAV-6, AAV-7, AAV-8, AAV-9, or AAV-rh10. In some embodiments, the cell type or tissue is brain. In some embodiments, the cell type or tissue is brain and the reference AAV is AAVrh.8, AAVrh. 10, AAVrh.39, AAVrh.43, or AAV9. In some embodiments, the cell type is a neuron. In some embodiments, the cell type is a neuron and the reference AAV is AAVrh.8, AAVrh.10, AAVrh.39, AAVrh.43, or AAV9. In some embodiments, the cell type or tissue is plasma. In some embodiments, the cell type or tissue is ear. In some embodiments, the cell type or tissue is plasma and the reference AAV is AAV-2, AAV-3, AAV-6, AAV-7, AAV-8, AAV-9, AAV-9-PHP.B, or AAV-rh. 10. In some embodiments, the cell type or tissue is kidney. In some embodiments, the cell type or tissue is kidney and the reference AAV is AAV-2, AAV-3, AAV-6, AAV-7, AAV-8, AAV-9, or AAV-rh10. In some embodiments, the cell type or tissue is liver. In some embodiments, the cell type or tissue is liver and the reference AAV is AAV-2, AAV-3, AAV-5, AAV-6, AAV-7, AAV-8, AAV-9, or AAV-rh10. In some embodiments, the cell type or tissue is ear. In some embodiments, the cell type or tissue is ear and the reference AAV is AAV-2, AAV-3, AAV-6, AAV-7, AAV-8, AAV-9, AAV-9-PHP.B, or AAV-rh.10.

[0215] In some embodiments, a novel rAAV viral particle of the disclosure has increased transduction efficiency as compared to a reference AAV. In certain embodiments, the transduction efficiency of a novel rAAV viral particle is increased by about 1-fold, 2-fold, 3-fold, 4-fold, 5-fold, 6-fold, 7-fold, 8-fold, 9-fold, 10-fold, 11-fold, 12-fold, 15-fold, 20-fold, 25-fold, 30-fold, 40-fold, 50-fold, or more than 50-fold compared to a reference AAV. In some embodiments, transduction efficiency of a novel rAAV viral particle is increased by at least about 1-fold, 2-fold, 3-fold, 4-fold, 5-fold, 6-fold, 7-fold, 8-fold, 9-fold, 10-fold, 11-fold, 12-fold, 15-fold, 20-fold, 25-fold, 30-fold, 40-fold, 50-fold, or more than 50-fold compared to a reference AAV. In certain embodiments, the transduction efficiency of a novel rAAV viral particle is increased by about 1-fold to 3-fold, 2-fold to 5-fold, 5-fold to 10-fold, or 10-fold to 20-fold compared to a reference AAV. In specific embodiments, transduction efficiency is determined by a technique known to one of skill in the art or described herein (e.g., in the Examples (e.g., Example 5), infra).

[0216] In some embodiments, a novel rAAV viral particle of the disclosure with increased tropism for a particular cell or tissue relative to a reference AAV, while de-targeting another cell or tissue, as assessed by a technique known to one of skill in the art or described herein (e.g., as described in Examples 6 and 7). In specific embodiments, a novel rAAV viral particle of the disclosure with increased tropism for the heart relative to a reference AAV, while de-targeting the liver, as assessed by a technique known to one of skill in the art or described herein (e.g., as described in Example 6).

[0217] In some embodiments, a novel rAAV viral particle of the disclosure has decreased tropism for a particular cell or tissue (e.g., a liver cell or the liver) as compared to a reference AAV. In some embodiments, the decrease is about 5%, 10%, 15%, 20%, 25%, 30%, 35%, 40%, 45%, or 50% decrease in tropism for a particular cell type or tissue (e.g., a liver cell or the liver) as compared to a reference AAV.

[0218] In some embodiments, a novel rAAV viral particle of the disclosure has increased transduction efficiency as compared to a reference AAV. In certain embodiments, the transduction efficiency of a novel rAAV viral particle is increased by about 0.5 log, 1 log, 1.5 logs, 2 logs, 2.5 logs, 3 logs, or more compared to a reference AAV. In some embodiments, transduction efficiency of a novel rAAV viral particle is increased by at least about 0.5 log, at least about 1 log, at least about 1.5 logs, at least about 2 logs, at least about 2.5 logs, at least about 3 logs, or more compared to a reference AAV. In certain embodiments, the transduction efficiency of a novel rAAV viral particle is increased by about 0.5 log to 3 log, 0.5 log to 2.5 logs, 0.5 log to 2 logs, 0.5 log to 1.5 logs, or 0.5 log to 1 log compared to a reference AAV. In certain embodiments, the transduction efficiency of a novel rAAV viral particle is increased by about 1 log to 3 log, 1 log to 2.5 logs, 1 log to 2 logs, or 1 log to 1.5 logs compared to a reference AAV. In certain embodiments, the transduction efficiency of a novel rAAV viral particle is increased by about 2 log to 2.5 log or 2 log to 3 logs compared to a reference AAV. In specific embodiments, transduction efficiency is determined by a technique known to one of skill in the art or described herein (e.g., in the Examples (e.g., Example 5), infra).

[0219] In some embodiments, a novel rAAV viral particle of the disclosure has increased tropism for a particular cell or tissue relative to a reference AAV (e.g., AAV-1, AAV-6, AAV-7, AAV-8, AAV-9, or AAV-rh10), while de-targeting another cell or tissue, as assessed by a technique known to one of skill in the art or described herein (e.g., as described in Example 6, 7, 8, 10, or 11). In some embodiments, the increase is an increase that is at least 10%, at least 20%, at least 30%, at least 40%, at least 50%, at least 60%, or at least 70% greater than the AAV reference. In some embodiments, the increase is an increase that is at least 0.5 log, at least 1 log, at least 1.5 logs, at least 2 logs, at least 2.5 logs, or at least 3 logs greater than the AAV reference. In some embodiments, the increase is an increase that is 0.5 log, 1 log, 1.5 logs, 2 logs, 2.5 logs, or 3 logs greater than the AAV reference. In some embodiments, the increase is an increase that is at least 0.5 log to 3 logs greater than the AAV reference. In some embodiments, the increase is an increase that is 0.5 log to 2 logs, 0.5 log to 2.5 logs, 0.5 log to 3 logs, 1 log to 3 logs, or 1 log to 2 logs greater than the AAV reference. In specific embodiments, a novel rAAV viral particle of the disclosure has increased tropism for the heart relative to a reference AAV, while de-targeting the liver, as assessed by a technique known to one of skill in the art or described herein (e.g., as described in Example 6). In a specific embodiment, the novel rAAV viral particle comprises a capsid protein with a “BCD_” prefix in Example 6, infra. In a specific embodiment, the novel rAAV particle comprises BCD_0126 capsid protein. In another specific embodiment, the novel rAAV viral particle comprises a BCD_0282 capsid protein. In another specific embodiment, the novel rAAV viral particle comprises a BCD_0176 capsid protein. In another specific embodiment, the novel rAAV viral particle comprises a BCD_0446 capsid protein. In another specific embodiment, the novel rAAV viral particle comprises a BCD_0160 capsid protein. In another specific embodiment, the novel rAAV viral particle comprises a BCD_0195 capsid protein. In another specific embodiment, the novel rAAV viral particle comprises a BCD_0180 capsid protein. In another specific embodiment, the novel rAAV viral particle comprises a BCD_0192 capsid protein. In another specific embodiment, the novel rAAV viral particle comprises a BCD_0185 capsid protein. In another specific embodiment, the novel rAAV viral particle comprises a BCD_0454 capsid protein. In another specific embodiment, the novel rAAV viral particle comprises a BCD_0277 capsid protein. In another specific embodiment, the novel rAAV viral particle comprises a BCD_0174 capsid protein. In another specific embodiment, the novel rAAV viral particle comprises a BCD_0167 capsid protein. In another specific embodiment, the novel rAAV viral particle comprises a BCD_0126 capsid protein. In another specific embodiment, the novel rAAV viral particle comprises a BCD_0125 capsid protein. In another specific embodiment, the novel rAAV viral particle comprises a BCD_0193 capsid protein. In another specific embodiment, the novel rAAV viral particle comprises a BCD_0286 capsid protein. In another specific embodiment, the novel rAAV viral particle comprises a BCD_0182 capsid protein. In another specific embodiment, the novel rAAV viral particle comprises a BCD_0283 capsid protein. In another specific embodiment, the novel rAAV viral particle comprises a BCD_0361 capsid protein. In another specific embodiment, the novel rAAV viral particle comprises a BCD_0106 capsid protein.

[0220] In some embodiments, a novel rAAV viral particle has increased tropism for a brain tissue relative to a reference AAV (e.g., AAVrh.8, AAVrh.10, AAVrh.39, AAVrh.43, or AAV-9, AAV-9-PHP.eb). In some embodiments, a novel rAAV viral particle has increased tropism for a brain neuron relative to a reference AAV (e.g., AAVrh.8, AAVrh.10, AAVrh.39, AAVrh.43, or AAV-9, AAV-9-PHP.eb). In some embodiments, the increase is an increase that is at least 30%, at least 40%, at least 50%, at least 60%, or at least 70% greater than the AAV reference. In some embodiments, the increase is an increase that is 30% to 50% or 50% to 75% greater than the AAV reference. In some embodiments, the increase is an increase that is at least 0.5 log, at least 1 log, at least 1.5 logs, at least 2 logs, at least 2.5 logs, or at least 3 logs greater than the AAV reference. In some embodiments, the increase is an increase that is 0.5 log, 1 log, 1.5 logs, 2 logs, 2.5 logs, or 3 logs greater than the AAV reference. In some embodiments, the increase is an increase that is at least 0.5 log to 3 logs greater than the AAV reference. In some embodiments, the increase is an increase that is 0.5 log to 2 logs, 0.5 log to 2.5 logs, 0.5 log to 3 logs, 1 log to 3 logs, or 1 log to 2 logs greater than the AAV reference. In a specific embodiment, the novel rAAV viral particle comprises a capsid protein with a “BCD_” prefix in Example 6, 8, or 11, infra. In a specific embodiment, the novel rAAV particle comprises BCD_0126 capsid protein. In another specific embodiment, the novel rAAV viral particle comprises a BCD_0282 capsid protein. In another specific embodiment, the novel rAAV viral particle comprises a BCD_0176 capsid protein. In another specific embodiment, the novel rAAV viral particle comprises a BCD_0446 capsid protein. In another specific embodiment, the novel rAAV viral particle comprises a BCD_0160 capsid protein. In another specific embodiment, the novel rAAV viral particle comprises a BCD_0195 capsid protein. In another specific embodiment, the novel rAAV viral particle comprises a BCD_0180 capsid protein. In another specific embodiment, the novel rAAV viral particle comprises a BCD_0192 capsid protein. In another specific embodiment, the novel rAAV viral particle comprises a BCD_0185 capsid protein. In another specific embodiment, the novel rAAV viral particle comprises a BCD_0454 capsid protein. In another specific embodiment, the novel rAAV viral particle comprises a BCD_0277 capsid protein. In another specific embodiment, the novel rAAV viral particle comprises a BCD_0174 capsid protein. In another specific embodiment, the novel rAAV viral particle comprises a BCD_0167 capsid protein. In another specific embodiment, the novel rAAV viral particle comprises a BCD_0126 capsid protein. In another specific embodiment, the novel rAAV viral particle comprises a BCD_0125 capsid protein. In another specific embodiment, the novel rAAV viral particle comprises a BCD_0193 capsid protein. BCD_0286 capsid protein. In another specific embodiment, the novel rAAV viral particle comprises a BCD_0182 capsid protein. In another specific embodiment, the novel rAAV viral particle comprises a BCD_0283 capsid protein. In another specific embodiment, the novel rAAV viral particle comprises a BCD_0106 capsid protein.

[0221] In some embodiments, a novel rAAV viral particle has increased tropism for the ear relative to a reference AAV (e.g., AAV-2, AAV-3, AAV-6, AAV-7, AAV-8, AAV-9, or AAV-rh10). In a specific embodiment, the novel rAAV viral particle comprises a capsid protein with a “BCD_” prefix in Example 10, infra. In a specific embodiment, the novel rAAV viral particle comprises a BCD_0361 capsid protein. In a specific embodiment, the novel rAAV viral particle comprises a BCD_0106 capsid protein.

[0222] In some embodiments, a novel rAAV viral particle has increased tropism for the heart or liver relative to a reference AAV (e.g., AAV-2, AAV-3, AAV-6, AAV-7, AAV-8, AAV-9, or AAV-rh10). In a specific embodiment, the novel rAAV viral particle comprises a BCD_0126 capsid protein.

[0223] In some embodiments, a novel rAAV viral particle of the disclosure has increased activity (e.g., expression of a transgene) in a particular cell or tissue relative to a reference AAV (e.g., AAV-1, AAV-6, AAV-7, AAV-8, AAV-9, or AAV-rh10), as assessed by a technique known to one of skill in the art or described herein. In some embodiments, a novel rAAV viral particle of the disclosure has increased activity (e.g., expression of a transgene) in heart cells or heart tissue relative to a reference AAV (e.g., AAV-1, AAV-6, AAV-7, AAV-8, AAV-9, or AAV-rh10), as assessed by a technique known to one of skill in the art or described herein. In some embodiments, the increase is an increase that is at least 10%, at least 20%, at least 30%, at least 40%, at least 50%, at least 60%, or at least 70% greater than the AAV reference. In some embodiments, the increase is an increase that is at least 0.5 log, at least 1 log, at least 1.5 logs, at least 2 logs, at least 2.5 logs, or at least 3 logs greater than the AAV reference. In some embodiments, the increase is an increase that is 0.5 log, 1 log, 1.5 logs, 2 logs, 2.5 logs, or 3 logs greater than the AAV reference. In some embodiments, the increase is an increase that is at least 0.5 log to 3 logs greater than the AAV reference. In some embodiments, the increase is an increase that is 0.5 log to 2 logs, 0.5 log to 2.5 logs, 0.5 log to 3 logs, 1 log to 3 logs, or 1 log to 2 logs greater than the AAV reference. In a specific embodiment, the novel rAAV viral particle comprises a capsid protein with a “BCD_” prefix set forth in any one of Example 4-8, and 10-11 infra.

[0224] In some embodiments, a reference AAV is AAV-1, AAV-2, AAV-4, AAV-5, AAV-6, AAV-7, AAV-8, AAV-9, AAV-10, AAV-11, AAV-12, and/or AAV-13. In certain embodiments, a reference AAV is AAV-rh.10 (AAVrh10), AAV-DJ (AAVDJ), AAV-DJ8 (AAVDJ8), AAV-1, AAV-2, AAV-2G9, AAV-3, AAV3a, AAV3b, AAV3-3, AAV4, AAV4-4, AAV-5, AAV-6, AAV6.1, AAV6.2, AAV6.1.2, AAV-7, AAV7.2, AAV8, AAV9, AAV9.11, AAV9.13, AAV9.16, AAV9.24, AAV9.45, AAV9.47, AAV9.61, AAV9.68, AAV9.84, AAV9.9, AAV-10, AAV-11, AAV-12, AAV16.3, AAV24.1, AAV27.3, AAV42.12, AAV42-1b, AAV42-2, AAV42-3a, AAV42-3b, AAV42-4, AAV42-5a, AAV42-5b, AAV42-6b, AAV42-8, AAV42-10, AAV42-11, AAV42-12, AAV42-13, AAV42-15, AAV42-aa, AAV43-1, AAV43-12, AAV43-20, AAV43-21, AAV43-23, AAV43-25, AAV43-5, AAV44.1, AAV44.2, AAV44.5, AAV223.1, AAV223.2, AAV223.4, AAV223.5, AAV223.6, AAV223.7, AAV1-7/rh.48, AAV1-8/rh.49, AAV2-15/rh.62, AAV2-3/rh.61, AAV2-4/rh.50, AAV2-5/rh.51, AAV3.1/hu.6, AAV3.1/hu.9, AAV3-9/rh.52, AAV3-11/rh.53, AAV4-8/r11.64, AAV4-9/rh.54, AAV4-19/rh.55, AAV5-3/rh.57, AAV5-22/rh.58, AAV7.3/hu.7, AAV16.8/hu. 10, AAV16.12/hu.11, AAV29.3/bb.1, AAV29.5/bb.2, AAV106.1/hu.37, AAV114.3/hu.40, AAV127.2/hu.41, AAV127.5/hu.42, AAV128.3/hu.44, AAV130.4/hu.48, AAV145.1/hu.53, AAV145.5/hu.54, AAV145.6/hu.55, AAV161.10/hu.60, AAV161.6/hu.61, AAV33.12/hu.17, AAV33.4/hu.15, AAV33.8/hu.16, AAV52/hu.19, AAV52.1/hu.20, AAV58.2/hu.25, AAVA3.3, AAVA3.4, AAVA3.5, AAVA3.7, AAVC1, AAVC2, AAVC5, AAVF3, AAVF5, AAVH2, AAVrh.72, AAVhu.8, AAVrh.68, AAVrh.70, AAVpi.1, AAVpi.3, AAVpi.2, AAVrh.60, AAVrh.44, AAVrh.65, AAVrh.55, AAVrh.47, AAVrh.69, AAVrh.45, AAVrh.59, AAVhu. 12, AAVH6, AAVLK03, AAVH-1/hu.1, AAVH-5/hu.3, AAVLG-10/rh.40, AAVLG-4/rh.38, AAVLG-9/hu.39, AAVN721-8/rh.43, AAVCh.5, AAVCh.5R1, AAVcy.2, AAVcy.3, AAVcy.4, AAVcy.5, AAVCy.5R1, AAVCy.5R2, AAVCy.5R3, AAVCy.5R4, AAVcy.6, AAVhu. 1, AAVhu.2, AAVhu.3, AAVhu.4, AAVhu.5, AAVhu.6, AAVhu. 7, AAVhu.9, AAVhu. 10, AAVhu.11, AAVhu.13, AAVhu.15, AAVhu. 16, AAVhu. 17, AAVhu.18, AAVhu.20, AAVhu.21, AAVhu.22, AAVhu.23.2, AAVhu.24, AAVhu.25, AAVhu.27, AAVhu.28, AAVhu.29, AAVhu.29R, AAVhu.31, AAVhu.32, AAVhu.34, AAVhu.35, AAVhu.37, AAVhu.39, AAVhu.40, AAVhu.41, AAVhu.42, AAVhu.43, AAVhu.44, AAVhu.44R1, AAVhu.44R2, AAVhu.44R3, AAVhu.45, AAVhu.46, AAVhu.47, AAVhu.48, AAVhu.48R1, AAVhu. 48R2, AAVhu.48R3, AAVhu.49, AAVhu.51, AAVhu.52, AAVhu.54, AAVhu.55, AAVhu.56, AAVhu.57, AAVhu.58, AAVhu.60, AAVhu.61, AAVhu.63, AAVhu.64, AAVhu.66, AAVhu.67, AAVhu. 14/9, AAVhu.t 19, AAVrh.2, AAVrh.2R, AAVrh.8, AAVrh.8R, AAVrh.12, AAVrh.13, AAVrh. 13R, AAVrh.14, AAVrh.17, AAVrh. 18, AAVrh. 19, AAVrh.20, AAVrh.21, AAVrh.22, AAVrh.23, AAVrh.24, AAVrh.25, AAVrh.31, AAVrh.32, AAVrh.33, AAVrh.34, AAVrh.35, AAVrh.36, AAVrh.37, AAVrh.37R2, AAVrh.38, AAVrh.39, AAVrh.40, AAVrh.46, AAVrh.48, AAVrh.48.1, AAVrh.48.1.2, AAVrh.48.2, AAVrh.49, AAVrh.51, AAVrh.52, AAVrh.53, AAVrh.54, AAVrh.56, AAVrh.57, AAVrh.58, AAVrh.61, AAVrh.64, AAVrh.64R1, AAVrh.64R2, AAVrh.67, AAVrh.73, AAVrh.74, AAVrh8R, AAVrh8R A586R mutant, AAVrh8R R533A mutant, AAAV, BAAV, caprine AAV, bovine AAV, AAVhE1.1, AAVhEr1.5, AAVhER1.14, AAVhEr1.8, AAVhEr1. 16, AAVhEr1.18, AAVhEr1.35, AAVhEr1.7, AAVhEr1.36, AAVhEr2.29, AAVhEr2.4, AAVhEr2.16, AAVhEr2.30, AAVhEr2.31, AAVhEr2.36, AAVhER1.23, AAVhEr3.1, AAV2.5T, AAV-PAEC, AAV-LK01, AAV-LK02, AAV-LK03, AAV-LK04, AAV-LK05, AAV-LK06, AAV-LK07, AAV-LK08, AAV-LK09, AAV-LK10, AAV-LK11, AAV-LK12, AAV-LK13, AAV-LK14, AAV-LK15, AAV-LK16, AAV-LK17, AAV-LK18, AAV-LK19, AAV-PAEC2, AAV-PAEC4, AAV-PAEC6, AAV-PAEC7, AAV-PAEC8, AAV-PAEC11, AAV-PAEC12, AAV-2-pre-miRNA-101, AAV-8h, AAV-8b, AAV-h, AAV-b, AAV SM 10-2, AAV Shuffle 100-1, AAV Shuffle 100-3, AAV Shuffle 100-7, AAV Shuffle 10-2, AAV Shuffle 10-6, AAV Shuffle 10-8, AAV Shuffle 100-2, AAV SM 10-1, AAV SM 10-8, AAV SM 100-3, AAV SM 100-10, BNP61 AAV, BNP62 AAV, BNP63 AAV, AAVrh.50, AAVrh.43, AAVrh.62, AAVrh.48, AAVhu. 19, AAVhu. 11, AAVhu.53, AAV4-8/rh.64, AAVLG-9/hu.39, AAV54.5/hu.23, AAV54.2/hu.22, AAV54.7/hu.24, AAV54.1/hu.21, AAV54.4R/hu.27, AAV46.2/hu.28, AAV46.6/hu.29, AAV128.1/hu.43, true type AAV (ttAAV), UPENN AAV10, or Japanese AAV10 serotypes, AAV_po.6, AAV_po., AAV_po.5, AAV_LK03, AAV_ra.1, AAV_bat_YNM, AAV_bat_Brazil, AAV_mo. 1, AAV_avian_DA-1, or AAV_mouse_NY1. This paragraph is sometimes referred to herein as “Item A”.

[0225] Techniques known to one of skill in the art may be used to assess the tropism of a novel rAAV for a particular cell type or tissue type. For example, IVIS assays, immunoassays (e.g., immunostaining or immunohistochemistry), in cells, tissues, or a subject, may be used to determine tropism. Also see, Examples 6-8, and 10-11.

### 6.3.2.6 Evading Pre-Existing AAV Humoral Immunity

[0226] The present disclosure provides rAAV viral particle that are particularly useful as AAV-based vectors and/or rAAV viral particles for certain biomedical applications based on their ability (i.e., profile) to evade the recognition, binding, and/or neutralization by pre-existing antibodies (NAbs) in polyclonal plasma or sera to AAVs. NAbs function primarily by binding to the exposed surface of the AAV capsid and blocking processes essential for cellular transduction. As such, the ability to evade pre-existing AAV humoral immunity (also referred to as AAV humoral immunity) can be determined for a novel AAV capsid using one or more of the in vitro assays, such as binding, IVIg neutralization, or cell transduction. See, e.g., Giles, A. R. et al. (2018). Journal of virology, 92 (20), 1011-18.

[0227] The ability of the rAAV viral particle to evade pre-existing AAV humoral immunity can be assessed by the determining the percentage of cellular transduction (% transduction) in a given cell line in pooled plasma or serum (i.e., IgG pooled from normal subjects in the appropriate media for the cell line). See, e.g., Example 4.

[0228] In some embodiments, a novel rAAV viral particle has a range from about 2% to about 500% greater transduction as compared to a reference AAV. In some embodiments, a novel rAAV viral particle has at least about 2%, 3%, 5%, 10%, 15%, 20%, 25%, 30%, 35%, 40%, 45%, or 50% greater transduction in cells as compared to a reference AAV. In some embodiments, a novel rAAV viral particle has at least about 20%, 25%, 30%, 35%, 40%, 45%, or 50% greater transduction in cells compared to a reference AAV. In some embodiments, a novel rAAV viral particle has at least about 55%, 60%, 65%, 70%, 75%, 80%, 85%, 90%, 95%, 99%, or 100% greater transduction in cells compared to a reference AAV. In some embodiments, a novel rAAV viral particle has at least about 110%, 125%, 150%, 175%, 200%, 250%, 300%, 350%, 400%, or 500% greater transduction in cells as compared to a reference AAV. In some embodiments, a novel rAAV viral particle has at least about 250%, 300%, 350%, 400%, or 500% greater transduction in cells as compared to a reference AAV.

[0229] In some other embodiments, the ability of rAAV viral particle to evade AAV humoral immunity can be assessed by determining the effective IgG neutralizing titer of a novel AAV capsid that results in neutralizing antibody (NAb) titer reduction as compared to a reference AAV. In some embodiments, a novel rAAV viral particle has a range from about a 1-fold to about 4,000-fold NAb titer reduction as compared to a reference AAV, e.g., a novel rAAV viral particle has from about 10-fold to about 25-fold, from about 25-fold to about 50-fold, from about 50-fold to about 75-fold, from about 75-fold to about 100-fold, from about 100-fold to about 150-fold, from about 150-fold to about 200-fold, from about 200-fold to about 250-fold, from about 250-fold to about 300-fold, at least about 350-fold, at least about 400-fold, from about 400-fold to about 450-fold, from about 450-fold to about 500-fold, from about 500-fold to about 550-fold, from about 550-fold to about 600-fold, from about 600-fold to about 700-fold, from about 700-fold to about 800-fold, from about 800-fold to about 900-fold, from about 900-fold to about 1000-fold, from about 1,000-fold to about 2,000-fold, from about 2,000-fold to about 3,000-fold, from about 3,000-fold to about 4,000-fold NAb titer reduction as compared to a reference AAV.

[0230] In some embodiments, the ability of a novel AAV capsid, AAV clade, or AAV branch member to evade AAV humoral immunity can be assessed by determining the best fit line of NC₅₀ for a novel AAV capsid by plotted the data on a log scale against a reference AAV on a linear scale (semi-log plot) and then determining the best fit line using scientific graphing program, such as, for example, GraphPad Prism. In some embodiments, a novel rAAV viral particle has a range from about 1-fold to about 600-fold increase in NC₅₀ as compared to a reference AAV, e.g., a novel rAAV particle has from about 10-fold to about 25-fold, from about 25-fold to about 50-fold, from about 50-fold to about 75-fold, from about 75-fold to about 100-fold, from about 100-fold to about 150-fold, from about 150-fold to about 200-fold, from about 200-fold to about 250-fold, from about 250-fold to about 300-fold, at least about 350-fold, at least about 400-fold, from about 400-fold to about 450-fold, from about 450-fold to about 500-fold, from about 500-fold to about 550-fold, from about 550-fold to about 600-fold increase in NC₅₀ as compared to a reference AAV. In some embodiments, the ability of a novel AAV capsid, AAV clade, or AAV branch member to evade AAV humoral immunity can be assessed by comparing the NC₅₀ of a novel AAV capsid, AAV clade, or AAV branch member. For example, the capsid protein, AAV-6 had an NC₅₀ from an IVIg assay, such as described in Example 4, of about 0.0476 mg/mL, while average NC₅₀ of a capsid protein in Branch 1 is about 0.5722 mg/mL. The same NC₅₀ analysis can be conducted at the clade and/or branch level. The difference in the NC₅₀ value indicates the enhanced ability of a novel capsid protein as provided herein to evade AAV humoral immunity in a population (e.g., a human population). In other embodiments, the novel capsid is compared to an AAV capsid protein such as, but not limited to, AAV-12 which has NC₅₀ from an IVIg assay, such as described in Example 4, of about 0.5263 mg/mL, AAV-6 which has an NC₅₀ from an IVIg assay, such as described in Example 4, of about 0.0476 mg/mL, AAV-7 which has NC₅₀ from an IVIg assay, such as described in Example 4, of about 0.0441 mg/mL, AAV-8 which has NC₅₀ from an IVIg assay, such as described in Example 4, of about 0.0610 mg/mL, AAV-9 which has NC₅₀ from an IVIg assay, such as described in Example 4, of about 0.0513 mg/mL, AAV-5 which has NC₅₀ from an IVIg assay, such as described in Example 4, of about 0.2326 mg/mL, AAV-2 which has NC₅₀ from an IVIg assay, such as described in Example 4, of about <0.0305 mg/mL, or a combination of one more AAVs, wherein the AAV-2 less than (“<”) NC₅₀ is estimated owing to the fact that the IVIg is lower than the test limit in the assay.

### 6.3.3 Novel Recombinant AAV Viral Particles

[0231] The disclosure provides recombinant AAV (rAAV) viral particles and pseudotyped novel rAAV viral particles comprising a novel AAV capsid sequences of the disclosure. Such particles can be made from a recombinant AAV vector genome and/or one or more vectors (e.g., plasmid, bacmid, cosmid or the like), and appropriate host cell as described herein.

[0232] The disclosure also provides novel rAAV viral particles and pseudotype viral particles comprising a modified novel AAV capsid amino acid sequence, see Section 6.3.1.4. Production of a novel rAAV viral particles is provided below. Also, see Example 3.

6.3.3.1 Vector and rAAV Vector Genome Constructs

[0233] The disclosure also provides a vector (e.g., plasmid, bacmid, cosmid or the like) and a rAAV vector genome comprising the novel AAV capsid sequences of the disclosure.

[0234] The vector from which the cell generates an rAAV vector genome may contain a promoter and a restriction site downstream of the promoter to allow insertion of a polynucleotide encoding one or more proteins of interest, wherein the promoter and the restriction site are located downstream of the 5′ AAV ITR and upstream of the 3′ AAV ITR. The vector may also contain a posttranscriptional regulatory element downstream of the restriction site and upstream of the 3′ AAV ITR. The viral construct may further comprise a polynucleotide inserted at the restriction site and operably linked with the promoter, where the polynucleotide comprises the coding region of a protein of interest.

[0235] A novel rAAV viral particle of the disclosure may be generated by a method comprising providing to a suitable host cell with an rAAV vector genome, together with Rep and Cap (e.g., any one of SEQ ID NOs: 192-307 and 363-364) genes and/or a transgene either in one, two, three, or four separate vectors, thereby delivery a complete rAAV vector genome to the host cell. The vector configuration used and number of vectors used depends on the type of production system used.

[0236] The elements used to make an rAAV vector genome of the disclosure are described in more detail below. A person skilled in the art will select the appropriate elements depending on the application. In some embodiments, the rAAV vector genome used to make a novel rAAV viral particle comprises, (a) one or both of (i) an AAV inverted terminal repeat (ITR) sequence and (ii) an AAV 3′ ITR, (b) a heterologous regulatory element for expression in a specific cell type, and (c) a nucleic acid sequence comprising a nucleotide sequence encoding a transgene (e.g., a therapeutic transgene or biomolecule). For example, it may comprise one or both 5′ and 3′ ITRs of AAV-2, a tissue-specific promoter (e.g., a liver-specific promoter or muscle-specific promoter), and a transgene. See Section 6.3.3.1A for exemplary ITRs, section 6.3.3.1C for transgenes, and Section 6.3.3.1D for regulatory elements. Depending on the application the appropriate promoter can be used.

[0237] In some embodiments, the rAAV vector genome comprises a therapeutic transgene comprising a nucleic acid sequence encoding a functional version of a protein (e.g., endogenous protein) operably linked to a heterologous expression control element, e.g., a promoter or enhancer; optionally an intron; and optionally a polyadenylation (polyA) signal that allows for expression in the host cell (i.e., delivery to a target cell).

[0238] Generation of a vector and/or an rAAV vector genome of the disclosure may be made using any suitable genetic engineering techniques well known in the art, including, without limitation, the standard techniques of restriction endonuclease digestion, ligation, transformation, plasmid purification, and DNA sequencing, for example as described in Green, M. and Sambrook, J., Molecular Cloning: A Laboratory Manual, 4th Ed., Cold Spring Harbor Laboratory (Cold Spring Harbor, N.Y. 2012).

[0239] Polynucleotides comprising a transgene (e.g., a therapeutic transgene) of the rAAV vector genome, such as codon-optimized, mini-genes, etc. can be made using various standard cloning, recombinant DNA technology, via cell expression or in vitro translation and chemical synthesis techniques known to those of skill in the art. See Green, M. and Sambrook, J., Molecular Cloning: A Laboratory Manual, 4th Ed., Cold Spring Harbor Laboratory (Cold Spring Harbor, N.Y. 2012).

### A. Inverted Terminal Repeats (ITRs)

[0240] An rAAV vector genome of the disclosure will often comprise an AAV inverted terminal repeat element (ITR). In some embodiments, an rAAV vector genome comprises one ITR or a fragment thereof. In some embodiments, an rAAV vector genome comprises a 5′ or 3′ ITR. In specific embodiments, an rAAV vector genome comprises two ITRs or a fragment thereof. In some embodiments, an rAAV vector genome comprises a 5′ ITR and a 3′ ITR. The AAV ITRs, together with the Rep coding region, provide for efficient excision and rescue from, and integration of a nucleotide sequence, such as a therapeutic transgene, interposed between two flanking ITRs into a host cell genome. Sequences of certain AAV-associated ITRs are disclosed by Yan et al., J. Virol. 79 (1): 364-379 (2005). In a specific embodiment, the AAV ITR sequences are from a different AAV serotype or different AAV clade than the AAV cap sequences. In some embodiments, the AAV ITR sequences are from the same AAV serotype or AAV clade as the AAV cap sequences. In some embodiments, the AAV ITR sequences are from a different AAV serotype or AAV clade than the AAV rep sequences. In some embodiments, the AAV ITR sequences are from the same AAV serotype or AAV clade as the AAV rep sequences. In another specific embodiment, the AAV ITR sequences are from a different AAV serotype or different AAV clade than the AAV cap sequences and rep sequences. In some embodiments, the AAV ITR sequences are from the same AAV serotype or AAV clade as the AAV cap sequences and rep sequences. Genomic sequences of various serotypes of AAV, as well as sequences of native terminal repeats (TRs), Rep proteins and capsid subunits are known in the art (e.g., such sequences can be found in the literature or in public databases such as GenBank). For example, GenBank accession numbers that provide the genomic sequences of various serotypes of AAV include NC_002077.1 (AAV1), AF063497.1 (AAV1), NC_001401.2 (AAV2), AF043303.1 (AAV2), J01901.1 (AAV2), U48704.1 (AAV3A), NC_001729.1 (AAV3A), AF028705.1 (AAV3B), NC_001829.1 (AAV4), U89790.1 (AAV4), NC_006152.1 (AA5), AF085716.1 (AAV-5), AF028704. 1 (AAV6), NC_006260.1 (AAV7), AF513851.1 (AAV7), AF513852.1 (AAV8), NC_006261.1 (AAV-8), AY530579.1 (AAV9), AAT46337 (AAV10) AAO88208 (AAVrh10), AY631966.1 (AAV11), DQ813647.1 (AAV12), and EU28SS62.1 (AAV13), the entirety of each of which is incorporated herein by reference, disclose nucleic acid and amino acid sequences. The ITR sequences of those GenBank sequences can be used in a rAAV vector genome described herein. In certain embodiments, the ITR sequences of an AAV disclosed in Table 4 may be used in an rAAV vector genome described herein. In a specific embodiment, an rAAV vector genome comprises the ITRs of AAV-2 or fragments thereof. This paragraph is sometimes referred to herein as “Item B”.

TABLE 4
AAV Reference Sequences and ITR Sequences
Table 4: AAV Reference Sequences

| | NCBI Reference Sequence No./ |
|---|---|
| | Genbank Accession No. |
| AAV Serotype | (each herein incorporated by reference) |
| AAV-1 | NC_002077.1 |
| AAV-2 | NC_001401.2 |
| AAV-3 | NC_001729.1 |
| AAV-3B | AF028705.1 |
| AAV-4 | NC_001829.1 |
| AAV-5 | NC_006152.1 |
| AAV-6 | AF028704-1 |
| AAV-7 | NC_006260.1 |
| AAV-8 | NC_006261.1 |
| AAV-9 | AX7S3250.1 |
| AAV-10 | AY631965.1 |
| AAV-11 | AY631966.1 |
| AAV-12 | DQ813647.1 |
| AAV-13 | EU28SS62.1 |

### B. AAV Rep and Cap Gene Sequences

[0241] A novel rAAV vector genome of the disclosure may comprise an AAV “rep” and “cap” nucleotide sequences encoding replication and encapsidation proteins, respectively. The AAV cap nucleotide sequences include the nucleotide sequences of the novel AAV capsids described herein.

[0242] Often, for gene therapy and/or delivery applications, the rep and cap genes will be provided in a separate vectors along with the rAAV vector genome (e.g. novel rAAV vector genome of the disclosure). In a specific embodiment, the AAV rep sequences are from a different AAV serotype or different AAV clade than the AAV cap sequences. In a specific embodiment, the AAV rep sequences are from the same AAV serotype or different AAV clade than the AAV cap sequences. In another specific embodiment, the AAV rep sequences are from a different AAV serotype or different AAV clade than the AAV cap sequences and ITR sequence(s). In another specific embodiment, the AAV rep sequences are from the same AAV serotype or different AAV clade than the AAV cap sequences and ITR sequence(s). Examples of AAV rep sequences include the AAV rep sequence of an AAV serotype in Table 4, supra. Examples of the same and different AAV clades or serotypes are provided herein (see FIGS. 3-14, Table 4, and Table 2).

[0243] The AAV cap gene encodes a cap protein (see Section 6.3.1) which is capable of packaging AAV vector genomes in the presence of rep and a helper function (e.g., adeno helper function) and is capable of binding a target cell. In some embodiments, the helper function can be provided by the host cell. The term “AAV helper” refer to AAV-derived coding sequences which can be expressed to provide AAV gene products that, in turn, function in trans for productive AAV replication. Thus, AAV helper functions include both of the major AAV open reading frames (ORFs), rep and cap. The Rep expression products have been shown to possess many functions, including, among others: recognition, binding and nicking of the AAV origin of DNA replication; DNA helicase activity; and modulation of transcription from AAV (or other heterologous) promoters. The capsid (Cap) expression products supply necessary packaging functions. AAV helper functions are used herein to complement AAV functions in trans that are missing from AAV vector genomes. In various embodiments, a vector providing AAV helper functions includes a nucleotide sequence(s) that encode Cap proteins or Rep proteins.

### C. Transgenes

[0244] A recombinant novel rAAV viral particle of the disclosure will often comprise a heterologous transgene (e.g., a therapeutic transgene). A transgene incorporated into the novel rAAV viral particle is not limited and may be any heterologous nucleotide sequence of interest (e.g., a heterologous gene of interest). The transgene is a nucleic acid sequence, heterologous to the vector genome sequences flanking the transgene, which encodes a polypeptide, protein, or other product, of interest. The nucleic acid coding sequence is operatively linked to one or more regulatory components (e.g., promoter, enhancer, poly-A, microRNA binding elements that either restrict and or enhance transgene expression, 3′UTR, Woodchuck Hepatitis Virus Posttranscriptional Regulatory Element (WPRE)) in a manner which permits transgene transcription, translation, and/or expression in a host cell. The composition of the heterologous transgene sequence will depend upon the application (e.g., the therapeutic application or indication to be treated). In some embodiments, a novel rAAV viral particle comprises two or more heterologous transgenes, for example, two, three, four or five heterologous transgenes. In other embodiments, a novel rAAV viral particle comprises one heterologous transgene incorporated into the rAAV viral particle.

[0245] The size of the nucleotide sequence of a transgene can vary. For example, the nucleotide sequence of a transgene encoding a therapeutic protein can be at least about 1.4 kb, at least about 1.5 kb, at least about 1.6 kb, at least about 1.7 kb, at least about 1.8 kb, at least about 2.0 kb, at least about 2.2 kb, at least about 2.4 kb, at least about 2.6 kb, at least about 2.8 kb, at least about 3.0 kb, at least about 3.2 kb, at least about 3.4 kb, at least about 3.5 kb in length, at least about 4.0 kb in length, at least about 5.0 kb in length, at least about 6.0 kb in length, at least about 7.0 kb in length, at least about 8.0 kb in length, at least about 9.0 kb in length, or at least about 10.0 kb in length. In some embodiments, the nucleotide sequence of a transgene encoding a therapeutic protein is at least about 1.4 kb in length. In certain embodiments, the nucleotide sequence of a transgene encoding a therapeutic protein is about 1.4 kb to 5 kb in length. In some embodiments, the nucleotide sequences of a transgene encoding a therapeutic protein is 1.4 kb to 5 kb or 5 kb to 10 kb. Alternatively, the nucleotide sequence of a transgene is at least about 30 nucleotides, at least about 40 nucleotides, at least about 50 nucleotides, at least about 75 nucleotides in length, at least about 100 nucleotides in length, at least about 150 nucleotides in length, at least about 200 nucleotides in length, at least about 250 nucleotides in length, at least about 300 nucleotides in length, at least about 350 nucleotides in length, at least about 400 nucleotides in length, at least about 500 nucleotides in length, at least about 600 nucleotides in length, at least about 700 nucleotides in length, at least about 800 nucleotides in length, at least about 900 nucleotides in length, at least about 1000 nucleotides in length, or at least about 1200 nucleotides in length. In some embodiments, the nucleotide sequence of a transgene is about 30 to 150 nucleotides in length or about 150 to 500 nucleotides in length. In certain embodiments, the nucleotide sequence of a transgene is about 100 to 500 nucleotides in length or 500 to 1000 nucleotides in length. In some embodiments, the nucleotide sequence of a transgene is 500 nucleotides to 1200 nucleotides in length.

[0246] In specific embodiments, a novel rAAV viral particle of the disclosure comprises a therapeutic transgene. A therapeutic transgene of the disclosure is typically a sequence that encodes a biomolecule (e.g., a therapeutic biomolecule) which is useful in biology and treatment of a disease, such as a protein (e.g., an enzyme), polypeptide, peptide, RNA (e.g., tRNA, dsRNA, ribosomal RNA, catalytic RNAs, siRNA, miRNA, pre-miRNA, lncRNA, snoRNA, small hairpin RNA, trans-splicing RNA, and antisense RNA), one or more components of a gene or base editing system, e.g., CRISPR gene editing system, antisense oligonucleotides (AONs), antisense oligonucleotide (AON)-mediated exon skipping, a poison exon(s) that triggers nonsense mediated decay (NMD), or a dominant negative mutant.

[0247] In certain embodiments, a transgene comprises a nucleic acid sequence encoding a sequence useful for gene therapy applications. For example, certain diseases come about when one or more loss-of-function mutations (e.g., null mutation and/or haploinsufficiency) within a gene reduce or abolish the amount or activity of the protein encoded by the gene. In certain embodiments, a transgene utilized herein encodes a functional version of the protein. In some embodiments, a functional version of the protein retains one, two, or more activities of an endogenous protein (e.g., a protein found in a human or non-human animal).

[0248] In other embodiments, a novel rAAV viral particle comprises a transgene comprising a nucleic acid sequence encoding a sequence useful for gene therapy applications that benefit from gene silencing. For example, certain diseases come about when gain-of-function mutations within a gene result in an aberrant amount or activity of the protein encoded by the gene. In certain embodiments, a transgene utilized herein encodes an inhibitory polynucleotide, e.g., an inhibitory RNA such as an miRNA or siRNA, or one or more components of gene editing system, e.g., a CRISPR gene editing system. In some embodiments, a transgene comprises a nucleic acid encoding a CRISPR-Cas system for targeted gene disruption or correction.

[0249] In other embodiments, a transgene comprising a nucleic acid sequence encodes a sequence useful for gene therapy applications that benefit from gene addition. In certain embodiments, a transgene utilized herein encodes a gene product, e.g., a protein, not present in a recipient, e.g., a human subject, of the gene therapy.

[0250] In some embodiments, a transgene comprises a nucleic acid sequence encoding an RNA sequence useful in biology and medicine, such as, e.g., tRNA, dsRNA, ribosomal RNA, catalytic RNA, siRNA, miRNA, pre-miRNA, lncRNA, snoRNA, small hairpin RNA, trans-splicing RNA, and antisense RNA. One example of a useful RNA sequence is a sequence which inhibits or extinguishes expression of a targeted nucleic acid sequence in a treated subject. Suitable target nucleic acid sequences may include oncologic sequences and viral sequences. In some embodiments, a transgene comprises a nucleic acid sequence encoding a small nuclear RNA (snRNA) construct which induces exon skipping. In certain embodiments, an RNAi agent targets a gene of interest at a location of a single-nucleotide polymorphism (SNP) or a variant within the nucleotide sequence.

[0251] In some embodiments, an RNAi agent is an siRNA duplex, wherein the siRNA duplex contains an antisense strand (guide strand) and a sense strand (passenger strand) hybridized together forming a duplex structure, wherein the antisense strand is at least partially complementary to the nucleic acid sequence of the targeted gene, and wherein the sense strand is at least partially homologous to the nucleic acid sequence of the targeted gene. In some embodiments, the 5′end of the antisense strand has a 5′phosphate group and the 3′end of the sense strand contains a 3′hydroxyl group. In some embodiments, there are none, one or 2 nucleotide overhangs at the 3′end of one or both strands. In some embodiments, one or more than one nucleotide of an antisense strand and/or a sense strand is modified. Non-limiting examples of nucleotide modifications include 2′deoxy, 2′-fluoro, 2′ O-methyl, 2′deoxy-2′fluoro, a phosphorothioate, 5′-morpholinno, a universal base modified nucleotide, a terminal cap molecule at the 3′-end, the 5′-end, or both 3′ and 5′-ends, an inverted abasic, or an inverted abasic locked nucleic acid modification at the 5′-end and/or 3′ end.

[0252] In some embodiments, each strand of an siRNA duplex targeting a gene of interest is about 19 to 25, 19 to 24 or 19 to 21 nucleotides in length. In some embodiments, an siRNA or dsRNA includes at least two sequences that are complementary to each other. The dsRNA includes a sense strand having a first sequence and an antisense strand having a second sequence. In some embodiments, the antisense strand includes a nucleotide sequence that is substantially complementary to at least part of an mRNA encoding the target gene, and the region of complementarity is 30 nucleotides or less, and at least 15 nucleotides in length. In some embodiments, the dsRNA is 19 to 25, 19 to 24 or 19 to 21 nucleotides in length. In some embodiments, the dsRNA is from about 15 to about 25 nucleotides in length. In some embodiments, the dsRNA is from about 25 to about 30 nucleotides in length. In some embodiments, the dsRNA is about, at least about, or at most about 15 nucleotides in length, 16 nucleotides in length, 17 nucleotides in length, 18 nucleotides in length, 19 nucleotides, 20 nucleotides, 21 nucleotides, 22 nucleotides, 23 nucleotides, 24 nucleotides, 25 nucleotides in length, 26 nucleotides in length, 27 nucleotides in length, 28 nucleotides in length, 29 nucleotides in length, or 30 nucleotides in length.

[0253] In some embodiments, a novel rAAV viral particle of the disclosure comprises a transgene comprising a nucleic acid sequence encoding a protein, peptide or other product that corrects or ameliorates a genetic deficiency or other abnormality in a subject. Such genetic deficiencies may include deficiencies in which gene products are expressed at less than levels considered normal for a particular subject (e.g., a human subject) or deficiencies in which a functional gene product is not expressed. In some embodiments, a novel rAAV viral particle of the disclosure comprises multiple transgenes to, e.g., correct or ameliorate a genetic defect caused by a multi-subunit protein. In some instances, a different transgene may be used to encode each subunit of a protein, or to encode different peptides or proteins. This may be desirable when the size of the nucleic acid sequence encoding the protein subunit is large, non-limiting examples include e.g., for an immunoglobulin, the platelet-derived growth factor, or a dystrophin protein. A host cell may be infected with a novel rAAV viral particle of the disclosure containing transgenes, wherein each transgene comprises a nucleic acid sequence encoding a different subunit of a multi-subunit protein, in order to produce the multi-subunit protein. Alternatively, a novel rAAV viral particle of the disclosure may comprise a single transgene comprising nucleic acid sequences encoding different subunits of a multi-subunit protein. In this case, a single transgene comprises nucleic acid sequences encoding each of the subunits and the nucleic acid sequence encoding each subunit may be separated by an internal ribozyme entry site (IRES). This may be desirable when the size of the nucleic acid sequence encoding each of the subunits is small, e.g., the total size of the nucleic acid sequences encoding the subunits and the IRES is less than five kilobases. As an alternative to an IRES, the nucleic acid sequence may be separated by sequences encoding a peptide, such as, e.g., 2A peptide, which self-cleaves in a post-translational event. See, e.g., Donnelly et al, J. Gen. Virol., 78 (Pt 1): 13-21 (January 1997); Furler, et al, Gene Ther., 8(11): 864-873 (June 2001); Klump et al., Gene Ther., 8 (10): 811-817 (May 2001). A 2A peptide is significantly smaller than an IRES, making it well suited for use when space is a limiting factor. More often, when a transgene is large, consists of multi-subunits, or both, two or more AAV viral particles (including a novel rAAV viral particle of the disclosure) each carrying a desired transgene may be co-administered to allow them to concatamerize in vitro or in vivo to form a single vector genome. See, e.g., Yang et al., J Virol. 1999 November; 73 (11): 9468-9477 for information regarding the concatamerization of AAV. For example, a first AAV viral particle may comprise a single transgene and a second AAV viral particle may comprise a different transgene for co-expression in a host cell.

[0254] In some embodiments, a transgene comprises a nucleic acid sequence encoding a protein heterologous to AAV (e.g., a therapeutic protein). In some embodiments, a transgene comprises a nucleic acid sequence encoding a therapeutic protein that is endogenously expressed in one or more of a muscle, heart, brain, plasma, kidney, ear, or liver cell/tissue of a subject. In certain embodiments, a transgene comprises a nucleic acid sequence encoding a therapeutic protein that is endogenously expressed in one or more of a muscle, heart, brain, plasma, kidney, or liver cell/tissue of a subject.

[0255] In some embodiments, a transgene comprises a nucleic acid sequence, which upon expression produces a detectable signal. In some instances, such a nucleic acid sequence encodes an enzyme (such as, e.g., β-lactamase, β-galactosidase (LacZ), alkaline phosphatase, thymidine kinase, chloramphenicol acetyltransferase (CAT), and luciferase), a fluorescent protein (such as, e.g., green fluorescent protein (GFP), yellow fluorescent protein, and red fluorescent protein), a membrane bound protein (such as, e.g., CD2, CD4, CD8, the influenza hemagglutinin protein, and others well known in the art, to which high affinity antibodies directed thereto exist or can be produced by conventional means) or a fusion protein comprising a membrane bound protein appropriately fused to an antigen tag domain from, among others, hemagglutinin or Myc. These nucleic acid sequences, when associated with regulatory elements which drive their expression, provide signals detectable by conventional means, including enzymatic, radiographic, colorimetric, fluorescence or other spectrographic assays, fluorescent activating cell sorting assays and immunological assays, including enzyme linked immunosorbent assay (ELISA), radioimmunoassay (RIA) and immunohistochemistry (IHC). For example, where the nucleic acid sequence encodes LacZ, the presence of an AAV vector genome expressing LacZ may be detected by assays for beta-galactosidase activity. In another example, where the transgene comprises a nucleic acid sequence encoding green fluorescent protein or luciferase, an AAV vector genome expressing the green fluorescent protein or luciferase may be detected visually by color or light production in a luminometer. An AAV viral particle comprising a transgene that comprises a nucleotide sequence encoding a product with a detectable signal may be used a selectable marker as discussed below or may be used to trace the virus.

### D. Regulatory Control Elements

[0256] Depending on the application, an AAV vector genome of the disclosure can include one or more regulatory control elements (e.g., transcription initiation sequence, termination sequence, promoter, enhancer, regulatory binding sites, poly-A, microRNA binding elements, 3′UTR, Woodchuck Hepatitis Virus Posttranscriptional Regulatory Element (WPRE)).

[0257] Often, a regulatory control element is heterologous and is operably linked to the transgene (e.g., therapeutic transgene) in a manner which permits its transcription, translation and/or expression in a host cell transfected with the novel rAAV vector genome of the disclosure. As used herein, “operably linked” includes both expression control sequences that are contiguous with the gene of interest and expression control sequences that act in trans or at a distance (e.g., an enhancer) to control the gene of interest.

[0258] Exemplary of regulatory control elements that can be used, include but are not limited to, transcription initiation, termination, promoter and/or enhancer sequences; efficient RNA processing signals such as splicing and polyadenylation (poly A) signals; sequences that stabilize cytoplasmic mRNA; sequences that enhance translation efficiency (i.e., Kozak consensus sequence); sequences that enhance protein stability; and when desired, sequences that enhance secretion of the encoded product. Where an AAV vector genome includes a coding sequence, a therapeutic transgene to be translated into a therapeutic protein or peptide, a promoter is included in the AAV vector genome.

[0259] Depending on the application and level of expression needed, a skilled artisan can use a promoter which is native to the cell type or subject to which the AAV vector genome is to be delivered. In some embodiments, a promoter is a constitutive promoter, inducible promoter and/or tissue-specific promoter. Further, the combination of regulatory control elements can be used in an AAV vector genome depends on the vector and its application.

[0260] In certain embodiments, a regulatory control element comprises a regulatory control element that modulates gene expression specifically in muscle tissue. In certain embodiments, a regulatory control element comprises a regulatory element that modulates gene expression specifically in the heart.

[0261] In certain embodiments, a regulatory control element comprises a regulatory element that modulates gene expression specifically in the brain. In some embodiments, a regulatory control element comprises a regulatory element that modulates gene expression specifically in the central nervous system. For example, in certain embodiments, a regulatory control element comprises a human synapsin 1 gene (hSyn1), human elongation factor 1α (hEF1α), or rat Calcium/calmodulin-dependent protein kinase type II alpha (CaMKIIα) promoter may be used.

[0262] In certain embodiments, a regulatory control element comprises a regulatory element that modulates gene expression specifically in the plasma. In certain embodiments, a regulatory control element comprises a regulatory element that modulates gene expression specifically in the kidney. In certain embodiments, a regulatory control element comprises a regulatory element that modulates gene expression specifically in the ear. In certain embodiments, a regulatory control element comprises a regulatory element that modulates gene expression specifically in a tissue or cell identified in an Example, infra.

[0263] In some embodiments, a regulatory control element comprises a regulatory element that modulates gene expression specifically in liver tissue. Examples of liver-specific regulatory elements include, but are not limited to, the mouse thyretin promoter (mTTR), the endogenous human factor VIII promoter (F8), human alpha-1-antitrypsin promoter (hAAT) and active fragments thereof, human albumin minimal promoter, and mouse albumin promoter. Enhancers derived from liver specific transcription factor binding sites are also contemplated, such as EBP, DBP, HNF1, HNF3, HNF4, HNF6, with Enh1.

### E. Selectable Markers or Reporter Genes

[0264] In some embodiments, the rAAV vector genome (e.g., novel rAAV vector genome) further comprises a selectable marker or reporter gene. Examples of selectable marker or reporter gene may include sequences encoding geneticin, hygromicin or purimycin resistance, among others. Such selectable reporters or marker genes (preferably located outside the viral genome to be rescued by the method of the invention) can be used to signal the presence of the plasmids in bacterial cells, such as ampicillin resistance. Other components of the plasmid may include an origin of replication. Selection of these and other promoters and vector elements are conventional and many such sequences are available. See, for example, Green, M. and Sambrook, J., Molecular Cloning and other references cited herein.

### 6.3.3.2 Novel Pseudotyped AAV Viral Particles

[0265] The disclosure also provides various novel pseudotyped AAV viral particles using the novel AAV capsid sequences described herein or modified novel AAV capsid sequences described herein and the genome elements (i.e., Rep or ITR sequences) of a different AAV (e.g., different AAV serotype and/or clade).

[0266] In one embodiment, the novel pseudotyped AAV viral particles of the disclosure comprise one or more the novel AAV capsid sequences described herein or modified novel AAV capsid sequences described herein, Rep or ITR sequences or fragments thereof of a different AAV, and a transgene (e.g., a transgene that comprises a nucleotide sequence encoding a therapeutic protein). In another embodiment, the novel pseudotyped AAV viral particles of the disclosure comprise one or more the novel AAV capsid sequences described herein or modified novel AAV capsid sequences described herein, Rep and ITR sequences of a different AAV, and a transgene (e.g., a transgene that comprises a nucleotide sequence encoding a therapeutic protein). Examples of different AAVs that can be used to make a novel pseudotyped AAV viral particles, include any one of the reference AAVs provided herein (e.g., in Table 4 or Item A or Item B).

### 6.3.3.3 Other AAV Capsid Based Vectors

[0267] The novel AAV capsid sequences of the disclosure can be adapted for use in other viral vector systems for in vitro, ex vivo or in vivo gene delivery. For instance, the novel AAV capsid sequences may be used to construct a hybrid vector comprising an expression cassette for a parvovirus other than AAV. For example, a hybrid vector may comprise a parovirus-derived (e.g., an autonomous parvovirus H1-derived or parovirus B19-derived) expression cassette, a promoter (e.g., p4 promoter), a gene encoding a protein of interest, and another promoter (e.g., p38 promoter) flanked by AAV ITRs and packaged into the novel capsids of the disclosure.

[0268] See, e.g., Krüger et al., Cancer Gene Therapy volume 15, pages 252-267 (2008) for a discussion of methods for producing a hybrid vector comprising AAV capsids. In addition, the novel AAV capsid sequences of the disclosure can be used to generate AAV virus-like particles (VLPs). See, e.g., Le et al. Sci Rep 9, 18631 (2019) for methods for producing AAV VLPs.

### 6.3.4 Host Cells

[0269] The disclosure also provides a host cell (e.g., an in vivo or an in vitro host cell) comprising a novel AAV capsid sequence, a modified AAV capsid sequence, or a novel rAAV viral particle of the disclosure and a recombinant nucleic acid molecule that further comprises a heterologous sequence (e.g., a therapeutic biomolecule or transgene and/or regulatory element). In some embodiments, the disclosure provides a host cell (e.g., an in vivo or an in vitro host cell) comprising a novel AAV capsid sequence or a modified AAV capsid sequence. In some embodiments, the disclosure provides a host cell (e.g., an in vivo or an in vitro host cell) comprising a novel rAAV viral particle of the disclosure. In some embodiments, the disclosure provides a host cell (e.g., an in vivo or an in vitro host cell) comprising a recombinant nucleic acid molecule that further comprises a heterologous sequence (e.g., a therapeutic biomolecule or transgene and/or regulatory element).

[0270] As used herein, the term “host” refers to organisms (e.g., insects, animals (including humans and non-human animals), yeast, bacteria, etc.) and/or cells which harbor a nucleic acid molecule or an AAV viral particle of the present disclosure, as well as organisms (e.g., humans and non-human animals) and/or cells that are suitable for use in expressing a recombinant gene or protein. It is not intended that the present disclosure be limited to any particular type of cell or organism. Indeed, it is contemplated that any suitable organism and/or cell will find use herein as a host. A host cell may be in the form of a single cell, a population of similar or different cells, for example in the form of a culture (such as a liquid culture or a culture on a solid substrate), an organism or part thereof. The host cell includes progeny of the cells infected by a novel rAAV viral particle described herein. Any host cell which allows for replication of an AAV and/or production of the therapeutic transgene in an AAV, and which can be maintained in culture is a part of the present disclosure.

[0271] Thus, the host cell of the disclosure can be, for example, a bacterial, a yeast, an insect, or a mammalian cell, or a human cell. Examples of preferred insect cells are High Five, Sf9, Se301, SeIZD2109, SeUCR1, Sf900+, Sf21, BTI-TN-5B1-4, MG-1, Tn368, HzAm1, BM-N, Ha2302, Hz2E5, or A38. Examples of preferred mammalian cells are HEK293, HeLa, CHO, NSO, SP2/0, PER.C6, Vero, RD, BHK, HT 1080, A549, Cos-7, ARPE-19, or MRC-5 cells. The host cell may be one described herein (e.g., in Section 6.4.3, or the Examples). In specific embodiments, the host cell is a non-human mammalian cell. In other embodiments, the host cell is a bacterial, yeast or insect cell. In certain embodiments, the host cell is a human cell. In specific embodiments, the human cell is a primary cell isolated from a human subject (e.g., the subject to be treated with gene therapy). In some embodiments, the host cell is from a cell line. In some embodiments, the host cell is in vitro or in cell culture (i.e., a cultured host cell). In other embodiments, the host cell is in vivo. In specific embodiments, a host cell(s) is isolated from a tissue.

[0272] In specific embodiments, provided herein is a host cell(s) comprising a novel AAV capsid sequence of the disclosure (e.g., VP1, VP2, or VP3). In specific embodiments, provided herein is a host cell(s) expressing a novel AAV capsid sequence of the disclosure (e.g., VP1, VP2, or VP3). In some embodiments, provided herein is a host cell comprising a novel AAV capsid sequence of the disclosure (e.g., VP1, VP2, or VP3) and a vector. In certain embodiments, provided herein is a host cell comprising a novel AAV capsid sequence of the disclosure (e.g., VP1, VP2, or VP3), a Rep gene and a vector. In certain embodiments, provided herein is a host cell comprising a novel AAV capsid sequence of the disclosure (e.g., VP1, VP2, or VP3), a Rep gene and a rAAV vector genome. In specific embodiments, provided herein is a host cell producing a novel rAAV viral particle of the disclosure.

[0273] In specific embodiments, provided herein is a host cell comprising a modified novel AAV capsid sequence of the disclosure (e.g., VP1, VP2, or VP3). In specific embodiments, provided herein is a host cell(s) expressing a modified novel AAV capsid sequence of the disclosure (e.g., VP1, VP2, or VP3). In some embodiments, provided herein is a host cell comprising a modified novel AAV capsid sequence of the disclosure (e.g., VP1, VP2, or VP3) and a vector. In certain embodiments, provided herein is a host cell comprising a modified novel AAV capsid sequence of the disclosure (e.g., VP1, VP2, or VP3), a Rep gene and a vector. In certain embodiments, provided herein is a host cell comprising a modified novel AAV capsid sequence of the disclosure (e.g., VP1, VP2, or VP3), a Rep gene and a rAAV vector genome.

[0274] The rAAV viral particles, host cells, and methods/use of the present disclosure are useful in a method of delivering a transgene (e.g., a therapeutic biomolecule) into a host cell. A host cell of the disclosure is often used for the manufacture of the novel rAAV viral particles. In a specific embodiment, a host cell described herein (e.g., in the Examples; in particular Example 3) is used in the production of a novel rAAV viral particle.

### 6.3.5 Pharmaceutical Compositions

[0275] The disclosure provides for compositions (e.g., pharmaceutical compositions) comprising a novel AAV capsid sequence or rAAV viral particle. In one embodiment, a composition comprises a novel AAV capsid sequence described herein or a vector comprising such a sequence as described in Section 6.3.1. In certain embodiments, a composition comprises a novel AAV capsid sequence described in the Examples herein. In some embodiments, a composition comprises a modified novel AAV capsid sequence or a vector comprising such a sequence. In a specific embodiment, provided herein is a composition (e.g., pharmaceutical compositions) comprising a novel rAAV viral particle. A pharmaceutical composition may comprise any novel rAAV viral particle(s) described herein. In some embodiments, a composition (e.g., pharmaceutical compositions) comprises two or more novel rAAV viral particles described herein.

[0276] In specific embodiments, provided herein are pharmaceutical compositions comprising a novel rAAV viral particle comprising a biomolecule or transgene described in Section 6.3.3.1C. In certain embodiments, provided herein are pharmaceutical compositions comprising a novel rAAV viral particle comprising a transgene(s) that comprises a nucleic acid sequence encoding a therapeutic protein useful for administration to subjects suffering from a genetic disorder. In some embodiments, provided herein are pharmaceutical compositions comprising a novel rAAV viral particle comprising a transgene that comprises a nucleic acid sequence of an RNA (e.g., siRNA, antisense RNA, miRNA, etc.). In certain embodiments, provided herein are pharmaceutical compositions comprising a novel rAAV viral particle comprising a transgene that comprises a component of the CRISPR system.

[0277] In certain embodiments, provided herein is a pharmaceutical composition comprising a plurality of rAAV viral particles (e.g., novel AAV capsid protein of the disclosure) comprising transgenes that comprise nucleic acid sequences encoding various elements of a CRISPR system. In some embodiments, a first AAV viral particle comprise a transgene comprising a nucleic acid sequence encoding a CRISPR-Cas (CRISPR-Cas9 enzyme); and a second AAV viral particle comprise a transgene comprising a nucleic acid sequence encoding a guide RNA sequence for a target gene to allow disruption of the target gene. In some embodiments, a first AAV viral particle comprise a transgene comprising a nucleic acid sequence encoding a CRISPR-Cas (CRISPR-Cas9 enzyme); a second AAV viral particle comprise a transgene comprising a nucleic acid sequence encoding a guide RNA sequence for a target gene; and a third AAV viral particle comprise a transgene comprising a nucleic acid sequence encoding a donor nucleic acid sequence for correction or replacement of a target gene. In some embodiments, a first AAV viral particle comprise a transgene comprising a nucleic acid sequence encoding a CRISPR-Cas (CRISPR-Cas9 enzyme) and a guide RNA sequence for a target gene; and a second AAV viral particle comprise a transgene comprising a nucleic acid sequence encoding a donor nucleic acid sequence for correction or replacement of a target gene. In some embodiments, a single AAV viral particle comprises a transgene comprising a nucleic acid sequence encoding a CRISPR-Cas (CRISPR-Cas9 enzyme) and a guide RNA sequence for a target gene to allow disruption of the target gene.

[0278] Non-limiting examples of Cas proteins include Cas1, Cas1B, Cas2, Cas3, Cas4, Cas5, Cas6, Cas7, Cas8, Cas9 (also known as Csn1 and Csx12), Cas10, Csy1, Csy2, Csy3, Cse1, Cse2, Csc1, Csc2, Csa5, Csn2, Csm2, Csm3, Csm4, Csm5, Csm6, Cmr1, Cmr3, Cmr4, Cmr5, Cmr6, Csb1, Csb2, Csb3, Csx17, Csx14, Csx10, Csx16, CsaX, Csx3, Csx1, Csx15, Csf1, Csf2, Csf3, Csf4, homologs thereof, or modified versions thereof. In some embodiments, the CRISPR enzyme directs cleavage of one or both strands at the location of a target sequence, such as within the target sequence and/or within the complement of the target sequence. In some embodiments, the CRISPR enzyme directs cleavage of one or both strands within about 1, 2, 3, 4, 5, 6, 7, 8, 9, 10, 15, 20, 25, 50, 100, 200, 500, or more base pairs from the first or last nucleotide of a target sequence.

[0279] In certain embodiments, a pharmaceutical composition provided herein is a liquid composition that comprises a novel rAAV viral particle. In other embodiments, a pharmaceutical composition provided herein that comprises a novel rAAV viral particle is a lyophilized composition. In certain embodiments, the concentration of a novel recombinant AAV virion in the composition may range from 1×10¹² vg/ml to 2×10¹⁶ vg/ml. See Section 6.4.2 for other doses.

[0280] The compositions described herein may comprises an excipient or carrier, e.g., a buffer. In a specific embodiment, provided herein are various pharmaceutical compositions comprising a novel AAV capsid sequence or viral particle as well as a pharmaceutically acceptable carrier and/or other medicinal agent, pharmaceutical agent or adjuvant, etc. In certain embodiments, a pharmaceutical composition described herein comprises a novel rAAV viral particle of the disclosure and one or more other agents, such as described in Section 6.3.5.

[0281] In some embodiments, the terms “pharmaceutically acceptable” and “physiologically acceptable” are used interchangeably. Typically, an agent (e.g., an excipient or carrier) is pharmaceutically acceptable when it is safe, non-toxic, and is not biologically or otherwise undesirable, and is acceptable for veterinary use as well as human pharmaceutical use.

[0282] In certain embodiments, a pharmaceutical composition provided herein comprises one or more pharmaceutically acceptable excipients to provide the composition with advantageous properties for storage and/or administration to subjects for the treatment of the genetic disorder. In some embodiments, the pharmaceutical compositions provided herein are capable of being stored at −65° C. for a period of at least 2 weeks, in one embodiment at least 4 weeks, in another embodiment at least 6 weeks and yet another embodiment at least about 8 weeks, without detectable change in stability. In this regard, the term “stable” means that the recombinant AAV virus present in the composition essentially retains its physical stability, chemical stability and/or biological activity during storage. For example, in certain embodiments, the recombinant AAV virus present in the pharmaceutical composition retains at least about 80% of its biological activity in a human patient during storage for a determined period of time (e.g., 1 to 6 months, 3 to 6 months, 3 to 9 months, or 6 to 12 months) at −65° C.; in other embodiments at least about 85%, 90%, 95%, 98% or 99% of the recombinant AAV virus' biological activity is retained in a human subject. In one embodiment, the subjects are juvenile human subjects (e.g., human subjects less than 18 years old). In some embodiments, the recombinant AAV virus present in the pharmaceutical composition retains at least about 80% of its biological activity assessed in in vitro assay in a host cell during storage for a determined period of time (e.g., 1 to 6 months, 3 to 6 months, 3 to 9 months, or 6 to 12 months) at −65° C.; in other embodiments at least about 85%, 90%, 95%, 98% or 99% of the recombinant AAV virus' biological activity is retained as assessed in an in vitro assay in a host cell.

[0283] In certain aspects, a pharmaceutical composition comprising a novel rAAV viral particle further comprises one or more buffering agents. For example, in various embodiments, a pharmaceutical composition provided herein comprises sodium phosphate dibasic at a concentration of about 0.1 mg/ml to about 3 mg/ml, about 0.5 mg/ml to about 2.5 mg/ml, about 1 mg/ml to about 2 mg/ml, or about 1.4 mg/ml to about 1.6 mg/ml. In one embodiment, a pharmaceutical composition provided herein comprises about 1.42 mg/ml of sodium phosphate, dibasic (dried). Another buffering agent that may find use in a pharmaceutical compositions provided herein is sodium phosphate, monobasic monohydrate which, in some embodiments, finds use at a concentration of from about 0.1 mg/ml to about 3 mg/ml, about 0.5 mg/ml to about 2.5 mg/ml, about 1 mg/ml to about 2 mg/ml, or about 1.3 mg/ml to about 1.5 mg/ml. In one embodiment, a pharmaceutical composition of the present embodiment comprises about 1.38 mg/ml of sodium phosphate, monobasic monohydrate. In another embodiment, a pharmaceutical composition provided herein comprises about 1.42 mg/ml of sodium phosphate, dibasic and about 1.38 mg/ml of sodium phosphate, monobasic monohydrate.

[0284] In another embodiment, a pharmaceutical composition provided herein may comprise one or more isotonicity agents, such as sodium chloride, in one embodiment at a concentration of about 1 mg/ml to about 20 mg/ml, for example, about 1 mg/ml to about 10 mg/ml, about 5 mg/ml to about 15 mg/ml, or about 8 mg/ml to about 20 mg/ml. In another embodiment, a pharmaceutical composition provided herein comprises about 8.18 mg/ml sodium chloride. Other buffering agents and isotonicity agents known in the art are suitable and may be routinely employed for use in the compositions provided herein.

[0285] In another embodiment, a pharmaceutical composition provided herein may comprises one or more bulking agents. Exemplary bulking agents include without limitation mannitol, sucrose, dextran, lactose, trehalose, and povidone (PVP K24). In certain embodiments, a pharmaceutical composition provided herein comprises mannitol, which may be present in an amount from about 5 mg/ml to about 40 mg/ml, or from about 10 mg/ml to about 30 mg/ml, or from about 15 mg/ml to about 25 mg/ml. In another embodiment, mannitol is present at a concentration of about 20 mg/ml.

[0286] In yet another embodiment, a pharmaceutical composition provided herein may comprise one or more surfactants, which may be non-ionic surfactants. Exemplary surfactants include ionic surfactants, non-ionic surfactants, and combinations thereof. For example, the surfactant can be, without limitation, TWEEN 80 (also known as polysorbate 80, or its chemical name polyoxyethylene sorbitan monooleate), TWEEN 20 (also known as polysorbate 20), sodium dodecyl sulfate, sodium stearate, ammonium lauryl sulfate, TRITON AG 98 (Rhone-Poulenc), poloxamer 407, poloxamer 188 and the like, and combinations thereof. In one embodiment, a pharmaceutical composition of the present embodiment comprises poloxamer 188, which may be present at a concentration of from about 0.1 mg/ml to about 4 mg/ml, or from about 0.5 mg/ml to about 3 mg/ml, from about 1 mg/ml to about 3 mg/ml, about 1.5 mg/ml to about 2.5 mg/ml, or from about 1.8 mg/ml to about 2.2 mg/ml. In another embodiment, poloxamer 188 is present at a concentration of about 2.0 mg/ml.

[0287] The pharmaceutical compositions provided herein are stable and can be stored for extended periods of time without an unacceptable change in quality, potency, or purity. In one aspect, the composition is stable at a temperature of about 5° C. (e.g., 2° C. to 8° C.) for at least 1 month, for example, at least 1 month, at least 3 months, at least 6 months, at least 12 months, at least 18 months, at least 24 months, or more. In another embodiment, the composition is stable at a temperature of less than or equal to about −20° C. for at least 6 months, for example, at least 6 months, at least 12 months, at least 18 months, at least 24 months, at least 36 months, or more. In another embodiment, the composition is stable at a temperature of less than or equal to about −40° C. for at least 6 months, for example, at least 6 months, at least 12 months, at least 18 months, at least 24 months, at least 36 months, or more. In another embodiment, the composition is stable at a temperature of less than or equal to about −60° C. for at least 6 months, for example, at least 6 months, at least 12 months, at least 18 months, at least 24 months, at least 36 months, or more.

[0288] Pharmaceutical compositions are typically sterile and stable under the conditions of manufacture and storage. Pharmaceutical compositions may be formulated as a solution, microemulsion, liposome, or other ordered structure suitable to accommodate high drug concentration. The carrier may be a solvent or dispersion medium containing, for example, water, ethanol, polyol (for example, glycerol, propylene glycol, and liquid polyethylene glycol, and the like), and suitable mixtures thereof. The proper fluidity can be maintained, for example, by the use of a coating such as lecithin, by the maintenance of the required particle size in the case of dispersion and by the use of surfactants. In some embodiments, isotonic agents, for example, sugars, polyalcohols such as mannitol, sorbitol, or sodium chloride are included in the composition. Prolonged absorption of the injectable compositions can be brought about by including in the composition an agent which delays absorption, for example, monostearate salts and gelatin. In certain embodiments, a novel rAAV viral particle provided herein may be administered in a time or controlled release composition, for example in a composition which includes a slow release polymer or other carriers that will protect the compound against rapid release, including implants and microencapsulated delivery systems. Biodegradable, biocompatible polymers may for example be used, such as ethylene vinyl acetate, polyanhydrides, polyglycolic acid, collagen, polyorthoesters, polylactic acid and polylactic, polyglycolic copolymers (PLG).

[0289] In some embodiments, a novel rAAV viral particle of the disclosure may be administered in via a delivery vehicle, such as a nanocapsule, microparticle, microsphere, lipid particle, exosome, exosome-like particle, or nanoparticle. The novel rAAV viral particle may be encapsulated within such a delivery vehicle. The delivery vehicle with the novel rAAV viral particle encapsulated may be in a pharmaceutical composition comprising an excipient, such as a buffer or other carrier.

[0290] In some embodiments, the pharmaceutical composition comprising a novel rAAV viral particle is used for transferring a transgene (e.g., therapeutic biomolecule) to a host cell. Depending on the application and disease to be treated, the transfer can be in vitro, ex vivo, in vivo, or a combination thereof.

### 6.4 Methods

[0291] The disclosure also provides various methods of use and treatment comprising a novel AAV capsid sequence of the disclosure (e.g., a novel rAAV viral particle or a composition thereof).

### 6.4.1 Methods of Delivery

[0292] Also provided are methods of using a novel rAAV viral particle or a composition of the disclosure for delivery of a biomolecule, e.g., a therapeutic biomolecule, to a cell, tissue, and/or organ. The method of delivery can be in vivo, in vitro, or ex vivo delivery.

[0293] The method comprises contacting a cell with an AAV viral particle as provided in Section 6.3.3. In some embodiments, the method is used to deliver a biomolecule (e.g., a therapeutic biomolecule) and/or composition to a particular cell, tissue, or organ type. For example, the method can be used to deliver a biomolecule (e.g., a therapeutic biomolecule) and/or composition to a muscle, heart, liver, plasma, kidney, brain, or cancer cell, or a combination thereof. Alternatively, the method of delivery can compromise one or more cell/tissue specificity, e.g., tropism as provided in Section 6.3.2.5.

[0294] In some embodiments, the method is used to deliver a therapeutic to a broad range of in vivo cells, including dividing or non-dividing cells. In some embodiments, the method is used to deliver a therapeutic gene to an in vitro cell, e.g., to produce a polypeptide encoded by such a therapeutic transgene for ex vivo gene therapy. It is contemplated that the methods of delivery provided by the disclosure can be for in vivo, in vitro, and/or ex vivo gene therapy approaches.

[0295] The method of delivery can be used to treat a disease or disorder. The structural and/or functional features of the novel AAV capsid sequences presented herein allow for an AAV-capsid platform approach for multiple disease indications that have one or more common defects or therapeutic needs as discussed in more detail below.

### 6.4.2 Methods of Treatment

[0296] The present disclosure provides methods of treatment of a disease or disorder that can be treated by delivery of a biomolecule to a particular tissue or cell type (e.g., muscle, heart, brain/CNS, plasma, kidney, liver, or cancer cell), comprising administering a novel rAAV viral particle, AAV vector construct, host cell or pharmaceutical composition of the disclosure comprising a therapeutic transgene or secreted therapeutic protein to a subject (e.g., a mammal or a human subject) in need thereof. In a specific embodiment, provided herein is a method for treating a disease or disorder, comprising administering to a subject (e.g., a human subject) in need thereof a therapeutically effective amount of a novel rAAV viral particle or a pharmaceutical composition thereof. In some embodiments, the disease or disorder treated can be a muscle, a heart, a brain, a CNS, a plasma, a kidney, a liver, an ear, or a cell proliferation (e.g., cancer or begin tumor) related disease or disorder. In some embodiments, the disease or disorder is one associated with one or more loss-of-function mutations within a gene, which reduces or abolishes the amount or activity of the protein encoded by the gene. In some embodiments, the disease or disorder is one associated with one or more haploinsufficiency mutations within a gene. In some embodiments, the disease or disorder is one associated with one or more gain-of-function mutations within a gene, which results in an aberrant amount or activity of the protein encoded by the gene.

[0297] In a specific embodiment, provided herein are methods of readministering or redosing subjects with an AAV viral particle, comprising administering two or more different AAV viral particles, wherein the AAV viral particle administered for the second or subsequent dosing comprises a different AAV capsid than the first AAV viral particle, and wherein at least one of the AAV viral particles is a novel rAAV viral particle described herein. In some embodiments, the first and second AAV viral particles each comprise a capsid protein(s) (e.g., VP1, VP2, or VP3) and those capsid proteins have less than or equal to 77%, 75%, 70%, 65%, 60%, 55%, or 50% sequence identity to each other. In some embodiments, the first and second AAV viral particles each comprise a capsid protein(s) (e.g., VP1, VP2, or VP3) and those capsid proteins have 50%, 55%, 60%, 65%, 70%, 75%, or 80% sequence identity to each other. In some embodiments, the first and second AAV viral particles each comprise a capsid protein(s) (e.g., VP1, VP2, or VP3) and those capsid proteins have 50% to 80%, 50% to 75%, 50% to 70%, 50% to 65%, or 50% to 60% sequence identity to each other. The AAV viral particles may comprise the same or a different transgene. Without wishing to be bound by theory, it is hypothesized that use of first and second AAV viral particles that have low capsid sequence identity will result in a lower immune response to the second AAV viral particle that is reduced in, e.g., an assay described herein (e.g., an assay described in Example 5) or known to one of skill in the art compared to readministration of the same first AAV viral particle, thereby permitting better transduction efficiency and transgene expression in the subject.

[0298] In various embodiments, the first and second capsids are phylogenetically distinct. In various embodiments, the phylogenetic difference is based on a threshold level of sequence homology. In various embodiments, the sequence homology of the capsids, or capsid proteins, may be less than or equal to 90%, 89%, 88%, 87%, 86%, 85%, 84%, 83%, 82%, 81%, 80%, 79%, 78%, 77%, 76%, 75% or lower sequence homology. In various embodiments, the sequence homology of the capsids, or capsid proteins, may be from about 30% to 90% homologous, from about 45% to 87% homologous, from about 40% to 86% homologous, from about 50% to 85% homologous, or from about 60% to 80% homologous, or from about 65% to 75% homologous. See, for example phylogenetically distinct capsids provided in FIGS. 3-13.

[0299] In some embodiments, there is low pre-existing immunity in the subject (e.g., a mammal or a human subject) to the first capsid and/or second capsid. In a specific embodiment, a subject exhibits low pre-existing immunity to either the first capsid, the second capsid or both the first and second capsids. In some embodiments, an in vitro assay to measure neutralizing antibody to AAV capsid is used to determine if a subject exhibits pre-existing immunity to the first capsid, the second capsid, or both the first and second capsids. In a specific embodiment, a technique known to one of skill in the art or described herein (e.g., in the Examples, infra) is used to assess pre-existing immunity in a subject.

[0300] In various embodiments, the first capsid may be from an AAV capsid in one clade in any one of Table 2 and the second AAV capsid is selected from a different clade, wherein there is sufficient phylogenetic distance between the viruses and/or amino acid sequence identity of the VP1 protein between the first and second AAV capsid. For example, the first capsid may be selected from an AAV capsid in clade 0 and the second capsid may be selected from an AAV capsid in any one of clades 0, 1, 4, 6, 11, 12, 13, 16, 21, and 22 of the disclosure, or vice versa.

[0301] Dosages of an AAV viral particle administered to a subject will depend on a variety of factors such as the disease or disorder being treated, the severity of the disease or disorder being treated, the age of the subject being treated, weight of the subject to be treated, and the age of the subject being treated. In specific embodiments, a novel AAV particle or a composition thereof is administered to a subject at a dose of from about 1×10⁹ vg/kg to about 6×10¹⁶ vg/kg of body weight. In some embodiments, a novel rAAV viral particle of the disclosure or a composition thereof is administered at a dose that is lower than a dose of a reference AAV (see, e.g., Table 4 or Item A or Item B, supra, for examples of reference AAV). For example, a lower dose of a novel rAAV viral particle of the disclosure or a composition thereof is required or necessary to obtain the same or better therapeutic effect as compared to the dose of a reference (see, e.g., Table 4 or Item A or Item B, supra, for examples of reference AAV).

[0302] Examples of routes of administration that can be used include but are not limited to, direct delivery to the selected organ, oral, inhalation, intravenous, intramuscular, subcutaneous, intradermal, intranasal, intrathecal, intrapancreatic, intraperitoneal, and other parental routes of administration.

### 6.4.3 Methods of Manufacture

[0303] The disclosure provides methods of manufacture using the novel AAV capsid sequences of the disclosure to produce a novel rAAV viral particle or a biomolecule (e.g., a therapeutic protein). Depending on the application, the biomolecule (e.g., the therapeutic protein) can be produced in vitro or in vivo.

6.4.3.1 Production of Novel rAAV Viral Particles

[0304] Any method known in the art may be used for the preparation of a novel rAAV viral particle of the disclosure. In some embodiments, a novel rAAV viral particle is produced in mammalian cells (e.g., HEK293). In some embodiments, a novel rAAV viral particle is produced in insect cells (e.g., Sf9). In some embodiments, an AAV viral particle is prepared by providing to a host cell with an AAV vector genome comprising a transgene together with a Rep and Cap gene. In some embodiments, an AAV vector genome comprises a transgene, an AAV Rep gene and an AAV Cap gene. In some embodiments, an rAAV viral particle is prepared by providing to a host cell with two or more vectors. For example, in some embodiments, an AAV vector genome comprising a transgene is introduced (e.g., transfected or transduced) into a cell with a vector (e.g., a plasmid or baculovirus) comprising an AAV Rep gene and a AAV Cap gene. In some embodiments, a cell is transfected or transduced with an AAV vector genome comprising a transgene, a vector (e.g., a plasmid or baculovirus) comprising an AAV Rep gene, and a vector (e.g., a plasmid or baculovirus) comprising an AAV Cap gene. In some embodiments, a method for producing a rAAV viral particle comprises culturing a host cell comprising a rAAV vector genome, a Rep protein, and a Cap gene, wherein the Cap gene encodes a capsid protein described herein. In some embodiments, the method further comprises isolating the rAAV viral particle from the host cell.

[0305] Methods of making AAV viral particles are well known in the art and are described in e.g., U.S. Pat. Nos. 6,204,059, 5,756,283, 6,258,595, 6,261,551, 6,270,996, 6,281,010, 6,365,394, 6,475,769, 6,482,634, 6,485,966, 6,943,019, 6,953,690, 7,022,519, 7,238,526, 7,291,498 and 7,491,508, 5,064,764, 6,194,191, 6,566,118, 8,137,948; or International Publication Nos. WO1996039530, WO1998010088, WO1999014354, WO1999015685, WO1999047691, WO2000055342, WO2000075353, WO2001023597, WO2015191508, WO2019217513, WO2018022608, WO2019222136, WO2020232044, WO2019222132; Methods In Molecular Biology, ed. Richard, Humana Press, NJ (1995); O'Reilly et al., Baculovirus Expression Vectors, A Laboratory Manual, Oxford Univ. Press (1994); Samulski et al., J. Vir. 63:3822-8 (1989); Kajigaya et al., Proc. Nat'l. Acad. Sci. USA 88:4646-50 (1991); Ruffing et al., J. Vir. 66:6922-30 (1992); Kimbauer et al., Vir., 219:37-44 (1996); Zhao et al., Vir. 272:382-93 (2000); the contents of each of which are herein incorporated by reference in their entirety.

[0306] In some embodiments, a novel rAAV viral particle is produced in host cell that allows for the production and replication of the novel rAAV particle. For example, the host cell may be a bacterial cell or eukaryotic cell, such as, e.g., an insect cell, yeast cell and mammalian cell (e.g., human cell or non-human mammalian cell). In specific embodiments, the host cell is from a cell line. Host cells commonly used for production of rAAV viral particles include, but are not limited to, HEK293 cells, COS cells, HeLa cells, KB cells, and other mammalian cell lines as described in U.S. Pat. Nos. 6,156,303, 5,387,484, 5,741,683, 5,691,176, and 5,688,676; U.S. Patent Application Publication No. 2002/0081721, and International Patent Publication Nos. WO 2000047757, WO 2000024916, and WO 1996017947, the contents of each of which are herein incorporated by reference in their entirety. In some embodiments, the HEK293 cells may be HEK-293T cells. Other examples of mammalian cells that may be used for the production of AAV viral particles include A549, WEH1, 3T3, 10T1/2, BHK, MDCK, COS 1, COS 7, BSC 1, BSC 40, BMT 10, VERO, W138, Saos, C2C12, L cells, HT1080, HepG2 and primary fibroblast, hepatocyte and myoblast cells derived from mammals. In some embodiments, host cells used for the production of AAV viral particles are cells derived from mammalian species including, but not limited to, human, monkey, mouse, rat, rabbit, and hamster. In some embodiments, host cells used for the production of AAV viral particles are cells derived from a cell type, including but not limited to fibroblast, hepatocyte, tumor cell, cell line transformed cell, etc.

[0307] In some embodiments, a novel rAAV viral particle is produced in an insect cell. Growing conditions for insect cells in culture, and production of heterologous products in insect cells in culture are well-known in the art, see U.S. Pat. No. 6,204,059, the contents of which are herein incorporated by reference in its entirety.

[0308] Any insect cell which allows for replication of parvovirus and which can be maintained in culture can be used in accordance with the disclosure. Cell lines may be used from Spodoptera frugiperda, including, but not limited to the Sf9 or Sf21 cell lines, Drosophila cell lines, or mosquito cell lines, such as Aedes albopictus derived cell lines. Use of insect cells for expression of heterologous proteins is well documented, as are methods of introducing nucleic acids, such as vectors, e.g., insect-cell compatible vectors, into such cells and methods of maintaining such cells in culture. See, for example, Methods in Molecular Biology, ed. Richard, Humana Press, NJ (1995); O'Reilly et al., Baculovirus Expression Vectors, A Laboratory Manual, Oxford Univ. Press (1994); Samulski et al., J. Vir. 63:3822-8 (1989); Kajigaya et al., Proc. Nat'l. Acad. Sci. USA 88:4646-50 (1991); Ruffing et al., J. Vir. 66:6922-30 (1992); Kimbauer et al., Vir. 219:37-44 (1996); Zhao et al., Vir. 272:382-93 (2000); and Samulski et al., U.S. Pat. No. 6,204,059, the contents of each of which is herein incorporated by reference in its entirety.

[0309] Baculovirus expression vectors for producing viral particles in insect cells, including but not limited to Spodoptera frugiperda (Sf9) cells, provide high titers of viral particle product. Infectious baculovirus particles released from a primary infection secondarily infect additional cells in the culture, exponentially infecting the entire cell culture population in a number of infection cycles that is a function of the initial multiplicity of infection, see Urabe, M. et al., J. Virol. 2006 February; 80 (4): 1874-85, the contents of which are herein incorporated by reference in their entirety.

[0310] Production of novel rAAV viral particles with baculovirus in an insect cell system may address known baculovirus genetic and physical instability. In some embodiments, the production system addresses baculovirus instability over multiple passages by utilizing a titerless infected-cells preservation and scale-up system. In some embodiments, small scale seed cultures of viral producing cells are transfected with viral expression constructs encoding the structural, non-structural, components of the viral particle. Baculovirus-infected viral producing cells are harvested into aliquots that may be cryopreserved in liquid nitrogen; the aliquots retain viability and infectivity for infection of large scale viral producing cell culture Wasilko D J et al., Protein Expr Purif. 2009 June; 65 (2): 122-32, the contents of which are herein incorporated by reference in their entirety.

[0311] In some embodiments, a genetically stable baculovirus is used as the source of one or more of the components for producing AAV viral particles in invertebrate cells. In some embodiments, defective baculovirus expression vectors are maintained episomally in insect cells. In some embodiments, the bacmid vector is engineered with replication control elements, including but not limited to promoters, enhancers, and/or cell-cycle regulated replication elements.

[0312] In some embodiments, stable host cells permissive for baculovirus infection are engineered with at least one stable integrated copy of any of the elements necessary for AAV replication and viral particle production including, but not limited to, the entire AAV genome, Rep and Cap genes, Rep genes, Cap genes, each Rep protein as a separate transcription cassette, each VP protein as a separate transcription cassette, the AAP (assembly activation protein), or at least one of the baculovirus helper genes with native or non-native promoters.

[0313] In some embodiments, a novel rAAV viral particle of the disclosure is produced by triple transfection or baculovirus mediated virus production, or any other method known in the art. Any suitable permissive or packaging cell known in the art may be employed to produce the particles. In some embodiments, trans-complementing packaging cell lines that provide functions deleted from a replication-defective helper virus is used, e.g., 293 cells or other Ela trans-complementing cells. A packaging cell line may be used that is stably transformed to express cap and/or rep genes. Alternatively, a packaging cell line may be used that is stably transformed to express helper constructs necessary for AAV viral particle assembly.

[0314] In some embodiments, a novel rAAV viral particle production is modified to increase the scale of production. Large scale viral production methods according to the disclosure is any of those disclosed in U.S. Pat. Nos. 5,756,283, 6,258,595, 6,261,551, 6,270,996, 6,281,010, 6,365,394, 6,475,769, 6,482,634, 6,485,966, 6,943,019, 6,953,690, 7,022,519, 7,238,526, 7,291,498 and 7,491,508 or International Publication Nos. WO1996039530, WO1998010088, WO1999014354, WO1999015685, WO1999047691, WO2000055342, WO2000075353 and WO2001023597, the contents of each of which are herein incorporated by reference in their entirety. In some embodiments, methods of increasing viral particle production scale include increasing the number of host cells. In some embodiments, host cells comprise adherent cells. To increase the scale of viral particle production by adherent viral replication cells, larger cell culture surfaces are required. In some cases, large-scale production methods comprise the use of roller bottles to increase cell culture surfaces. Other cell culture substrates with increased surface areas are known in the art. Examples of additional adherent cell culture products with increased surface areas include, but are not limited to CELLSTACK®, CELLCUBE (Corning Corp., Corning, NY) and NUNC™ CELL FACTORY® (Thermo Scientific, Waltham, MA). In some embodiments, large-scale adherent cell surfaces include from about 1,000 cm² to about 100,000 cm². In some embodiments, large-scale adherent cell cultures include from about 10⁷ to about 10⁹ cells, from about 10⁸ to about 10¹⁰ cells, from about 10⁹ to about 10¹² cells or at least 10¹² cells. In some embodiments, large-scale adherent cultures produce from about 10⁹ to about 10¹², from about 10¹⁰ to about 10¹³, from about 10¹¹ to about 10¹⁴, from about 10¹² to about 10¹⁵ or at least 10¹⁵ AAV viral particles.

[0315] In some embodiments, large-scale viral production methods of the disclosure include the use of suspension cell cultures. Suspension cell culture allows for significantly increased numbers of cells. Typically, the number of adherent cells that can be grown on about 10-50 cm² of surface area can be grown in about 1 cm³ volume in suspension.

[0316] In some embodiments, transfection of host cells in large-scale culture formats is carried out according to any methods known in the art. In some embodiments, for large-scale adherent cell cultures, transfection methods include, but are not limited to the use of inorganic compounds (e.g., calcium phosphate), organic compounds (e.g., polyethyleneimine (PEI)) or the use of non-chemical methods (e.g., electroporation.) With cells grown in suspension, transfection methods can include, but are not limited to the use of calcium phosphate and the use of PEI. In some embodiments, transfection of large scale suspension cultures is carried out according to the section entitled “Transfection Procedure” described in Feng, L. et al., 2008. Biotechnol Appl. Biochem. 50:121-32, the contents of which are herein incorporated by reference in its entirety. In some embodiments, PEI-DNA complexes is formed for introduction of plasmids to be transfected. In some embodiments, cells being transfected with PEI-DNA complexes are ‘shocked’ prior to transfection. This comprises lowering cell culture temperatures to 4° C. for a period of about 1 hour. In some embodiments, cell cultures are shocked for a period of from about 10 minutes to about 5 hours. In some embodiments, cell cultures are shocked at a temperature of from about 0° C. to about 20° C.

[0317] In specific embodiments, a novel rAAV viral particle is isolated from the host cells it is produced in. In a specific embodiment, a novel rAAV viral particle is produced by the methods disclosed in the Examples (e.g., Example 3).

### 6.4.3.2 In Vitro Production of a Biomolecule

[0318] As a non-limiting example, a novel rAAV viral particle disclosed herein can be used to produce a biomolecule of interest (e.g., a protein of interest) in vitro, for example, in a cell culture. As one non-limiting example, in some embodiments, a method for producing a protein of interest in vitro, where the method includes contacting a novel rAAV viral particle comprising a nucleotide sequence encoding a biomolecule (e.g., a heterologous protein) with a cell in a cell culture, whereby the AAV viral particle expresses the biomolecule (e.g., protein of interest) in the cell.

### 6.4.3.3 In Vivo Production of a Biomolecule

[0319] A novel rAAV viral particle disclosed herein can be used to produce a biomolecule of interest (e.g., protein of interest) in vivo, for example in an animal such as a mammal. Some embodiments provide a method for producing a biomolecule of interest (e.g., protein of interest) in vivo, where the method includes administering a novel rAAV viral particle comprising a nucleotide sequence that comprises a transgene encoding the biomolecule (e.g., protein of interest) to the subject, whereby the AAV viral particle expresses the biomolecule of interest (e.g., protein of interest) in the subject. The subject can be, in some embodiments, a non-human mammal, for example, a monkey, a dog, a cat, a mouse, or a cow. In specific embodiments, the subject is a human. See Section 6.4.2 for routes of administration and for doses.

[0320] Other aspects and advantages of the present disclosure will be understood upon consideration of the following illustrative examples.

### 6.5 Examples

### 6.5.1 Example 1: Identification of Novel AAV Capsid Proteins from Animal Tissue Sources

[0321] To identify novel AAV capsid proteins, genomic DNA was collected from various animal tissue sources and publicly available NGS sequence databases were evaluated, as shown in FIGS. 1-2 and described in more detail below.

### Genomic DNA Preparation and Isolation:

[0322] Genomic DNA was prepared from the collected sample using the DNeasy Blood & Tissue kit (Qiagen catalog #69504). Polymerase chain reaction (PCR) was carried out on the genomic DNA using a forward primer complimentary to the helicase domain in rep and a reverse primer complementary to one of the several DNA binding domains in cap protein. The expected size of the PCR fragments is 1.5 kb under the following conditions: initial incubation: 97° C., 120 sec, denaturation step: 97° C., 15 sec, annealing step: 58° C., 60° C., or 62° C., 15 sec, extension step: 72° C., 120 sec. The denaturation, annealing, and extension steps were performed for 42 cycles. Then the reaction was incubated at 72° C., 7 min and stored at 4° C. until analyzed.

[0323] The PCR products were separated by electrophoresis on the FlashGel System (Lonza catalog #57034), PCR product is purified by Select-a-Size DNA Clean and Concentrator Kit (Zymo catalog #D4080) and cloned into pCR4-TOPO-TA (Invitrogen catalog #450030) according to the manufacturer's instructions. After transformation of E. coli, NEB5α cells, DNA was prepared from ampicillin resistant colonies and sequenced from both ends to determine if the insert encoded an AAV-related sequence.

[0324] If the inserts in pCR4-TOPO TA were related to AAV sequences various methods were used for isolation of capsid sequence. PCR based isolation methods included best guessed 3 prime UTR primer design, genome walking or around the episome PCR. In one method, sequence-specific primers were designed to the rep portion of the sequence to perform “around the episome PCR” (hereinafter “ATE PCR”) to obtain a complete capsid gene. ATE PCR is based on the notion that persistent AAV genomes forms circular episomes in animal tissues. Accordingly, one can use a “divergent” set of primers corresponding to a sequence in the rep gene to perform polymerase chain reactions to isolate most or all of any AAV sequence that may exist in that episome, and in particular one could isolate a complete contiguous capsid gene. Multimers of episomes can form, for example by homologous recombination, and in that case, it is possible to isolate more than one capsid gene (which usually are not the same) from a single ATE PCR reaction.

### Computational Analysis of PCR Amplified DNA Sequences:

[0325] Once complete sequences were determined they were identified as being AAV capsid genes using the BLAST algorithm (available at the NCBI website). Their relationship to previously published AAVs was determined using various alignment programs such as Geneious Prime, Clustal Omega (available at the EBI web site) or Vector NTI (Invitrogen, Inc.).

Production of Vectors and rAAV Viral Particles:

[0326] To produce the AAV, AAV capsid genes were subcloned into an expression plasmid (pAAV-RC; Agilent, Inc.), then transfected into HEK293 cells along with a vector (pAAV luciferase) and adenovirus helper plasmid (pHELPER; Agilent, Inc.). AAV production was allowed to occur for 3 days and then crude lysates were made by freeze-thawing the cells three times. Debris was pelleted and the supernatant (crude AAV) was titered by Q-PCR to determine a genomic titer (which confirms the capsid is capable of assembly and DNA packaging) and then used to assess transduction by the AAVs on various cells.

### Identification of AAV in NGS Databases:

[0327] Using Short Read Archive (SRA) from publicly available NGS databases, Magic-BLAST was used to align and compare the SRAs to a diverse AAV reference sequence that was constructed and assembled from published AAV from various animal sources.

[0328] The Magic-BLAST output was then parsed and compared to the diverse AAV reference sequence to identify sequences that matched the diverse AAV reference. Next, Megablast analysis was conducted to determine if the matches do not align with any published AAV sequence. SRA matches that aligned and met the criteria above are used to assemble a full length capsid VP1 protein.

### 6.5.2 Example 2: Generation of Vectors and rAAV Vector Genomes

[0329] Depending on the assay and production system used, vectors and/or rAAV vector genomes were generated as described below.

[0330] Briefly, constructs were prepared with the nucleic acid sequences for cap genes SEQ ID NOs. 1-180 and 361-362, rep gene, at least one ITR, such as AAV-2 (see Table 4), a promoter, one or more regulatory control elements and a transgene or a reporter gene using conventional cloning techniques. See Green, M. and Sambrook, J., Molecular Cloning: A Laboratory Manual, 4th Ed., Cold Spring Harbor Laboratory (Cold Spring Harbor, N.Y. 2012).

[0331] Depending on the production system used, the HEK293 cells and/or baculovirus, the vectors and/or rAAV vector genome was configured into either a vector genome or, for example there can be either: two, three, or four separate vectors comprising the needed genetic elements for AAV and transgene expression (e.g., ITRs, rep, cap, regulatory elements, transgene and/or adenovirus helper functions) for a rAAV vector genome/

[0332] The rAAV viral particles comprising the novel AAV capsid sequences were produced as provided in Example 3.

### 6.5.3 Example 3: Production of Novel rAAV Viral Particles in HEK293 and Baculovirus Infected Insect Cells

[0333] The vectors and/or rAAV vector genomes described in Example 2 were used to produce rAAV viral particles using the HEK293 cells and/or baculovirus infected insect cell production system as described below.

### Generation of Recombinant Bacmid:

[0334] DH10 Bac competent cells were thawed on ice. Recombinant shuttle plasmid (e.g., pFB-GFP) was added and gently mixed with the competent cells and incubated on ice for 30 minutes. The competent cells were then subjected to heat at a temperature of approximately 42° C. for 30 seconds and then chilled on ice for 2 minutes. The competent cells were shocked with heat for 30 seconds at 42° C. and chilled on ice for 2 min. SOC was added to the cells and the cells were allowed to incubate at 37° C. with agitation for 4 hours to allow recombination to take place. During the incubation period, X-gal was spread onto two LB-plates (additionally containing various antibiotics (e.g., kanamycin, gentamycin and tetracycline) for transformation, followed by IPTG.

[0335] An amount of the incubation mixture was obtained, diluted, and then spread onto the two LB-plates and incubated at 37° C. for approximately 30-48 hours. Several white colonies were selected from each plate and cultured overnight in LB medium containing the same combination of antibiotics provided in the LB-plates. Next, Bacmid DNA and a glycerol stock was prepared and stored at −80° C.

### Purification of Recombinant Bacmid DNA:

[0336] An amount of the Bacmid glycerol stock was removed and inoculated in LB medium containing the a combination of antibiotics for selection. Cultures were grown overnight at 37° C. with shaking. Next, an amount of the culture was spun in a microfuge at full speed for approximately 30 seconds.

[0337] The pellets were resuspended in a resuspension buffer using a pipette followed by a lysis buffer, and the tube was inverted several times to mix the buffer and then incubated at room temperature for approximately 5 minutes. An exemplary resuspension buffer comprises 50 mM Tris-CL, pH 8.0, 10 mM EDTA and 100 μg/mL RNase A. An exemplary lysis buffer comprises 200 mM NaOH and 1% SDS. An amount of precipitate buffer (e.g., a buffer comprising 3.0 M potassium acetate, pH 5.5) was slowly added and the tube was inverted several times to mix the buffer and then incubated on ice for approximately 10 minutes. The tube was centrifuged for approximately 10 minutes at full speed and the supernatant is poured into a tube containing isopropanol. The tube was inverted several times to mix the solution.

[0338] Next, the solution was centrifuged at full speed for approximately 15 minutes at room temperature and the supernatant was removed immediately after centrifuge with pipette.

[0339] An amount of 70% ethanol was added to rinse the pellet and spun again at full speed for 1 minute. The ethanol was then removed, and the solution was spun again to remove trace of the ethanol. An amount of TE/EB Buffer was added to each tube and the pellet was carefully dissolved by pipette. The solution was stored at −20° C. if not used immediately.

### Production of PO Stock of Recombinant Baculovirus:

[0340] Sf9 cells were seeded at approximately 1×10⁶ cells/well in a 6-well plate (or 6×10⁶ cells in a 10-cm plate or 1.7×10⁷ cells in a 15-cm dish) and the cells were allowed to attach for at least 1 hour before transfection.

[0341] Transfection solutions A and B were prepared as follows: Solution A: an amount of the Bacmid was diluted into an amount of serum free media without antibiotics in a 15-mL tube. Solution B: an amount of CellFectin was diluted into an amount of serum free media without antibiotics in a 15-mL tube. Solution B was added to Solution A and gently mixed by pipette approximately 3 times by pipette and incubated at room temperature for 30-45 minutes. Next, medium from the plate was aspirated and an amount of serum free media without antibiotics was added to wash the cells. An amount of SF900II without antibiotics was added to each tube containing lipid-DNA mixtures.

[0342] The medium from the cells was aspirated, the transfection solution was added to the cells and the cells were incubated for approximately 5 hours at 28° C. The transfection solution was removed and an amount of serum free media with antibiotics was added, and incubated for approximately 4 days at 28° C. Media that contains the recombinant baculovirus was collected and spun for approximately 5 minutes at 1000 rpm to remove cell debris. The baculovirus was stored at 4° C. under dark.

### Amplification of Baculovirus (P1):

[0343] Sf9 cells were grown to approximately 4×10⁶ cells/mL and diluted to approximately 2×10⁶ cells/mL with fresh medium in shaking flasks. An amount of the Sf9 cells was infected with an amount of the PO stock baculovirus. The multiplicity of infection (MOI) was approximately 0.1.

[0344] The Sf9 cells were incubated for approximately 3 days and the baculovirus was harvested. The cells were spun at 2,000 rpm for 5 minutes to pellet the cells and the supernatant was collected and stored at 4° C. under dark. The titer of the baculovirus was determined according to Clontech's Rapid Titer Kit protocol.

### Production of AAV Using P1 Recombinant Baculovirus:

[0345] Sf9 cells were grown to about 1×10⁷ cells/mL and diluted to about 5×10⁶ cells/mL. An amount of the diluted Sf9 cells were infected with Bac-vector (5 Moi) and Bac-helper (15 Moi) for 3 days. Cell viability was assessed on the third day (approximately 50%-70% dead cells were observed).

[0346] Cell pellets were harvested by centrifugation at 3000 rpm for 10 minutes. Media was removed and the cells lysed (or the cell pellets were stored at −20° C. if not used immediately).

### Lysis and Banding Protocol:

[0347] An amount of Sf9 lysis buffer plus Benzonase was added to each cell pellet and vortexed thoroughly to resuspend the cells. The resuspended Sf9 cells were incubated on ice for approximately 10 min. to cool lysate. The lysate was sonicated for approximately 20 seconds to lyse the cells thoroughly and then incubated at 37° C. for approximately 30 minutes.

[0348] An amount of 5 M NaCl was added and the mixture was vortexed and then incubated for another 30 minutes at 37° C. An amount of NaCl was added to bring the salt concentration to about 500 mM, vortexed and centrifuged at 8,000 rpm for 20 minutes at 15° C. to produce a cleared lysate.

[0349] The cleared lysate proceeds to ultracentrifugation steps. A CsCl-gradient was prepared by adding the cleared lysate first, then an amount of 1.32 g/cc and an amount of 1.55 g/cc CsCl solutions through a syringe with long needle. The interface between the CsCl solutions was marked. PBS was added up to the top of the centrifuge tubes and the tubes were carefully balanced and sealed.

[0350] The tubes were centrifuged at 55,000 rpm for approximately 20 hours at 15° C. A hole was puncture on the top of each tube and the AAV band located slightly above the interface mark of the two CsCl solutions was marked.

[0351] A second CsCl centrifugation was conducted by transferring the AAV solution to centrifuge tube for 70.1 Ti rotor and an amount of CsCl solution to near top of the tube was added. The tubes were balanced and sealed. The tubes were centrifuged at 65,000 rpm for approximately 20 hours and the AAV band (lower band, the higher band is empty capsids) was collected.

[0352] Three separate vectors and/or rAAV vector genomes were selected and tested for their ability to produce rAAV viral particle in HEK293 and/or baculovirus infected insect cells. The majority of the selected clones produced viral particles in either HEK293 cells and/or baculovirus infected insect cells (data not shown). Selected rAAV viral particles were chosen for further analysis as provided in the Examples below.

### 6.5.4 Example 4: Evaluation of Human Serum Neutralization of Novel rAAV Viral Particles

[0353] The ability of antibodies in human serum to neutralize selected rAAVs and novel rAAV viral particles was evaluated as described below.

### Intravenous Immunoglobulin (IVIg) Neutralization Assay:

[0354] HEK293T cells were seeded in density 4E4 cells/well in a 96 well plate and incubated overnight. Purified rAAVs were diluted to final titer of 2E6 vg/uL after mixing 1:1 with serial dilutions (0-20 mg/mL) of IVIg for 1 hour. Recombinant AAVs were added onto HEK293T cells at an MOI of 1000 with 10 μM Etoposide and incubated in 37° C. Seventy-two hours following viral addition, percent transduction was assessed by luciferase activity measured in Relative Luminescence Units (RLU) relative to control transductions with vector+BSA only.

[0355] Table 5 and FIGS. 14A-B show data for neutralization assays in HEK293T cells for each individual rAAV in the presence of increasing concentrations of purified human immunoglobulin (IVIg) from pooled healthy human serum. Luciferase expression was quantified and the data expressed as percent “%” transduction from the avg of duplicates. Luciferase expression was quantified and the data expressed as mean RLU.

[0356] FIG. 14B shows NC₅₀ data. The NC₅₀ was determined by calculating the concentration of IVIg (x-value of the point on a line) where transduction equals 50%, where the line is made by connecting two points above and below 50% transduction.

TABLE 5
IVIg neutralization data presented in (%) transduction.
Branch 2—IVIG neutralization data presented in (%) transduction

| Name/ | | | | | | | | | | |
|---|---|---|---|---|---|---|---|---|---|---|
| IVIg in | 10 | 5 | 2.5 | 1.25 | 0.625 | 0.312 | 0.156 | 0.078 | 0.039 | 0.00 |
| mg/ml | mg/ml | mg/ml | mg/ml | mg/ml | mg/ml | mg/ml | mg/ml | mg/ml | mg/ml | mg/ml |
| AAV-6 | 4.7E−01 | 3.9E−01 | 1.0E+00 | 2.1E+00 | 8.1E−01 | 1.0E+00 | 5.8E+00 | 2.3E+01 | 5.7E+01 | 100 |
| AAV-7 | 3.7E−01 | 4.3E−01 | 2.5E−01 | 4.3E−01 | 5.7E−01 | 2.7E+00 | 4.9E+00 | 2.8E+01 | 5.3E+01 | 100 |
| AAV-8 | 4.4E−02 | 4.0E−02 | 9.3E−02 | 3.8E−02 | 6.5E−02 | 7.3E−01 | 9.2E+00 | 3.6E+01 | 6.8E+01 | 100 |
| AAV-9 | 1.4E−01 | 6.0E−02 | 1.1E−01 | 1.0E−01 | 1.3E−01 | 2.2E+00 | 7.4E+00 | 3.4E+01 | 5.7E+01 | 100 |
| BCD_ | 4.8E−02 | 1.8E−02 | 2.9E−02 | 9.0E−02 | 1.8E−01 | 2.3E+00 | 1.3E+01 | 3.6E+01 | 6.1E+01 | 100 |
| 0106 | | | | | | | | | | |
| BCD_ | 1.8E−02 | 1.5E−02 | 5.4E−02 | 7.4E−02 | 2.7E−02 | 9.1E−02 | 7.7E−01 | 6.8E+00 | 3.1E+01 | 100 |
| 0159 | | | | | | | | | | |
| BCD_ | 1.0E−02 | 9.9E−03 | 1.3E−02 | 1.1E−01 | 1.9E−02 | 2.4E−01 | 7.5E+00 | 3.2E+01 | 5.8E+01 | 100 |
| 0190 | | | | | | | | | | |
| BMN_ | 2.8E−01 | 2.9E−01 | 2.1E−01 | 2.1E−01 | 4.2E−01 | 2.5E+00 | 3.8E+00 | 1.1E+01 | 4.1E+01 | 100 |
| 0213 | | | | | | | | | | |
| BMN_ | 1.4E−01 | 1.9E−01 | 9.6E−02 | 1.2E−01 | 1.2E−01 | 2.2E−01 | 2.1E+00 | 1.6E+01 | 3.9E+01 | 100 |
| 0217 | | | | | | | | | | |
| BMN_ | 4.9E−02 | 6.3E−02 | 2.8E−02 | 1.2E−01 | 9.9E−02 | 5.3E−01 | 5.3E+00 | 3.4E+01 | 6.1E+01 | 100 |
| 0251 | | | | | | | | | | |
| BMN_ | 5.2E−01 | 5.5E−01 | 5.5E−01 | 9.2E−01 | 7.7E−01 | 7.3E−01 | 5.6E+00 | 2.7E+01 | 5.4E+01 | 100 |
| 0264 | | | | | | | | | | |
| BMN_ | 4.8E−01 | 4.6E−01 | 6.6E−01 | 5.7E−01 | 5.4E−01 | 6.9E−01 | 1.3E+01 | 5.4E+01 | 8.0E+01 | 100 |
| 0270 | | | | | | | | | | |
| BMN_ | 6.4E−01 | 4.0E−01 | 7.6E−01 | 7.4E−01 | 1.1E+00 | 1.0E+00 | 6.2E+00 | 5.1E+01 | 7.1E+01 | 100 |
| 0271 | | | | | | | | | | |
| BMN_ | 2.4E−01 | 1.9E−01 | 2.3E−01 | 2.0E−01 | 1.5E−01 | 1.6E+00 | 1.2E+01 | 3.5E+01 | 6.9E+01 | 100 |
| 0272 | | | | | | | | | | |
| BMN_ | 2.2E−01 | 1.8E−01 | 1.9E−01 | 1.8E−01 | 2.2E−01 | 5.8E−01 | 1.9E+00 | 1.6E+01 | 5.4E+01 | 100 |
| 0273 | | | | | | | | | | |
| BMN_ | 1.4E−01 | 1.3E−01 | 1.9E−01 | 1.8E−01 | 2.3E−01 | 2.6E+00 | 1.5E+01 | 4.1E+01 | 6.1E+01 | 100 |
| 0304 | | | | | | | | | | |
| BMN_ | 6.1E−01 | 6.1E−01 | 6.0E−01 | 5.2E−01 | 5.7E−01 | 1.3E+00 | 1.4E+01 | 4.5E+01 | 6.0E+01 | 100 |
| 0308 | | | | | | | | | | |
| BMN_ | 7.1E−01 | 5.6E−01 | 5.6E−01 | 9.3E−01 | 1.1E+00 | 1.3E+00 | 8.5E+00 | 2.3E+01 | 5.1E+01 | 100 |
| 0320 | | | | | | | | | | |
| BMN_ | 1.2E−01 | 1.2E−01 | 1.2E−01 | 5.7E−01 | 1.8E−01 | 2.0E+00 | 8.4E+00 | 3.1E+01 | 4.6E+01 | 100 |
| 0321 | | | | | | | | | | |
| BCD_ | 2.2E+00 | 1.2E+00 | 1.6E+00 | 1.7E+00 | 1.5E+00 | 9.8E−01 | 1.2E+00 | 1.5E+01 | 6.5E+01 | 100 |
| 0386 | | | | | | | | | | |
| BCD_ | 6.85E−02 | 5.44E−02 | 1.03E−01 | 6.04E−02 | 1.22E−01 | 1.21E−01 | 4.52E+00 | 1.77E+01 | 4.97E+01 | 100 |
| 0160 | | | | | | | | | | |
| BCD_ | 9.85E−02 | 1.22E−01 | 7.27E−02 | 6.00E−02 | 8.61E−01 | 7.77E+00 | 2.10E+01 | 5.07E+01 | 7.48E+01 | 100 |
| 0361 | | | | | | | | | | |

[0357] The ability of antibodies in human serum to neutralize the novel rAAV viral particles compared to other AAVs are provided in the Table 5 and in FIGS. 14A-B. FIG. 14B provides the NC₅₀ calculated from the IVIg assay and as provided herein, for various capsids including some rAAV viral particles comprising an AAV capsid protein. The fold difference from a novel rAAV viral particle's NC₅₀ from a AAV capsid's NC₅₀ indicates the enhanced ability of the disclosed novel capsid to evade AAV humoral immunity. For example, in the IVIg assay the AAV capsid, AAV-12 had NC₅₀ of about 0.5263 mg/mL, AAV-6 had an NC₅₀ of about 0.0476 mg/mL, AAV-7 had an NC₅₀ of about 0.0441 mg/mL, AAV-8 had an NC₅₀ of about 0.0610 mg/mL, AAV-9 had an NC₅₀ of about 0.0513 mg/mL, and AAV-5 had an NC₅₀ of about 0.2326 mg/mL, AAV-2 had an estimated NC₅₀ of about less than <0.0305 mg/mL. The rAAV capsids in Branch 2 had an average NC₅₀ of 0.05259 mg/mL, while the novel rAAVs capsid (“BCDs) had an average of 0.05188 mg/ml and a range of 0.0337 mg/mL to 0.08 mg/mL. These data show that several novel rAAV viral particles comprising the novel capsid protein can evade the recognition, binding, and/or neutralization by antibodies in human plasma/sera and therefore have enhanced ability to evade AAV humoral immunity.

### 6.5.5 Example 5: Evaluation of In Vitro Cell Transduction of Novel rAAV Viral Particles

[0358] Selected novel rAAV viral particles were examined for their ability to transduce human cell lines.

Production and Purification of rAAV Viral Particles:

[0359] rAAV viral particles are produced by triple transfection of HEK293 cells using a rAAV vector genome plasmid, a rep and cap plasmid, and an AAV helper plasmid with Calcium Phosphate. AAV viral particles were purified by double Cesium Chloride gradient ultracentrifugation. AAV viral tier was determined by qPCR.

### HEK293 and HepG2 Cell Assays:

[0360] HEK293 and HepG2 cells were seeded at 4.5×10⁴ cells/well on a 96-well plate and incubated overnight. Etoposide was added on the day of infection to a final concentration of 4 μM and 20 μM for HEK293 and HepG2 cells, respectively. Next, purified AAV viral particles were added at a MOI of 2000 and transduction data was measured in relative luciferase units (RLU) 72 hours post-infection.

### U87MG Cell Assay:

[0361] Human glioblastoma U87MG cells were seeded at 4.5×10⁴ cells/well on a 96-well plate and incubated overnight. Etoposide was added on the day of infection to a final concentration of 4 μM. Purified AAV particles were added at a MOI of 2000 and transduction data was measured in RLU units 72 hours post-infection.

[0362] In Table 6, in vitro cell line transduction data for HEK293, HepG2, and U87MG are provided for each novel rAAV viral particle tested. The average cell transduction efficiency is shown as averaged RLU units (AVG), and the standard deviation (SD) is indicated. Blank cells indicate the assay has not yet been performed.

TABLE 6
In vitro cell transduction data presented in averaged
RLU units (AVG) and standard deviation (SD).
Branch 2—In vitro cell transduction data presented in RLU units

| | HepG2 | HepG2 | HEK293 | HEK293 | U87MG | U87MG |
|---|---|---|---|---|---|---|
| Name | (AVG) | (SD) | (AVG) | (SD) | (AVG) | (SD) |
| AAV-7 | 5.11E+04 | 1.26E+03 | 1.02E+04 | 7.75E+02 | 2.19E+04 | 1.76E+03 |
| AAV-8 | 7.70E+04 | 5.35E+02 | 1.14E+05 | 3.92E+03 | 6.64E+05 | 1.46E+04 |
| AAV-9 | 3.26E+04 | 1.64E+03 | 5.90E+03 | 6.22E+02 | 4.25E+04 | 2.72E+03 |
| BCD_0106 | 5.34E+04 | 6.98E+03 | 3.95E+04 | 5.50E+03 | 1.65E+04 | 2.79E+03 |
| BCD_0113 | 3.18E+04 | 4.00E+02 | 1.78E+04 | 1.24E+03 | 1.72E+05 | 1.23E+04 |
| BCD_0126 | 6.80E+04 | 6.50E+03 | 2.40E+04 | 4.10E+03 | 4.30E+05 | 1.20E+04 |
| BCD_0127 | 1.00E+05 | 5.90E+03 | 4.00E+04 | 1.70E+03 | 4.80E+05 | 1.60E+04 |
| BCD_0146 | 6.50E+04 | 1.20E+04 | 1.40E+04 | 1.40E+03 | 8.20E+04 | 4.40E+03 |
| BCD_0157 | 1.84E+05 | 1.84E+04 | 4.71E+04 | 2.89E+03 | 2.70E+05 | 1.26E+04 |
| BCD_0159 | 8.10E+03 | 5.95E+02 | 2.45E+04 | 5.33E+03 | 9.27E+04 | 9.10E+03 |
| BCD_0160 | 9.72E+04 | 6.87E+03 | 2.19E+04 | 4.40E+03 | 3.98E+05 | 2.48E+04 |
| BCD_0177 | 4.50E+04 | 4.00E+03 | 2.10E+04 | 7.30E+02 | 2.50E+05 | 1.20E+04 |
| BCD_0181 | 3.80E+04 | 3.30E+03 | 2.00E+04 | 2.80E+03 | 2.50E+05 | 1.10E+04 |
| BCD_0186 | 4.20E+04 | 4.40E+03 | 1.90E+04 | 2.40E+03 | 2.70E+05 | 1.80E+04 |
| BCD_0187 | 5.50E+04 | 5.30E+03 | 2.40E+04 | 1.60E+03 | 3.50E+05 | 1.60E+04 |
| BCD_0190 | 4.55E+04 | 6.29E+03 | 2.50E+04 | 5.51E+03 | 1.08E+05 | 3.42E+03 |
| BCD_0197 | 4.80E+04 | 4.50E+03 | 2.40E+04 | 2.50E+03 | 2.90E+05 | 1.70E+04 |
| BMN_0213 | 1.15E+04 | 2.69E+02 | 1.40E+04 | 3.50E+03 | 3.59E+04 | 4.12E+03 |
| BMN_0217 | 2.01E+04 | 6.73E+02 | 3.56E+04 | 5.30E+03 | 6.09E+04 | 1.57E+04 |
| BMN_0250 | | | | | 5.60E+01 | 4.00E+00 |
| BMN_0251 | 1.03E+05 | 9.73E+02 | 6.47E+04 | 1.37E+04 | 5.86E+04 | 4.03E+03 |
| BMN_0258 | 5.00E+01 | 4.00E+00 | 4.96E+03 | 1.68E+03 | 1.00E+02 | 2.40E+01 |
| BMN_0261 | 1.38E+03 | 2.68E+02 | 4.02E+02 | 5.00E+01 | 4.42E+02 | |
| BMN_0264 | 2.15E+04 | 1.88E+03 | 6.20E+03 | 2.80E+02 | 1.20E+04 | 4.47E+03 |
| BMN_0270 | 4.67E+04 | 2.37E+03 | 2.26E+04 | 6.14E+03 | 1.27E+05 | 4.17E+03 |
| BMN_0271 | 3.72E+04 | 7.33E+01 | 4.20E+03 | 5.55E+02 | 1.45E+04 | 4.55E+02 |
| BMN_0272 | 4.37E+04 | 2.40E+03 | 1.83E+04 | 2.28E+02 | 2.01E+04 | 2.96E+02 |
| BMN_0273 | 2.08E+04 | 3.36E+02 | 2.54E+04 | 9.12E+02 | 4.95E+03 | 1.60E+02 |
| BCD_0276 | 1.60E+04 | 2.87E+02 | 8.13E+03 | 8.00E+02 | 8.59E+04 | 7.12E+03 |
| BCD_0284 | 1.58E+04 | 2.62E+03 | 6.91E+03 | 5.95E+02 | 8.90E+04 | 1.01E+04 |
| BCD_0286 | 1.72E+04 | 1.25E+03 | 8.68E+03 | 1.35E+03 | 9.86E+04 | 1.10E+04 |
| BMN_0302 | | | | | 2.80E+01 | 6.00E+00 |
| BMN_0304 | 7.29E+04 | 4.31E+03 | 2.50E+04 | 3.48E+02 | 5.01E+04 | 2.68E+03 |
| BMN_0306 | 2.76E+02 | 1.00E+01 | 9.15E+02 | 1.49E+02 | 1.56E+03 | 2.88E+02 |
| BMN_0308 | 1.18E+04 | 6.79E+02 | 6.53E+03 | 1.03E+03 | 3.51E+04 | 1.82E+03 |
| BMN_0316 | 7.00E+01 | 2.00E+00 | 1.67E+03 | 3.53E+02 | 2.15E+03 | 1.88E+02 |
| BMN_0320 | 2.22E+04 | 1.47E+03 | 4.39E+04 | 9.70E+02 | 8.35E+03 | 5.50E+02 |
| BMN_0321 | 1.25E+04 | 1.87E+03 | 3.02E+04 | 1.97E+03 | 1.22E+05 | 1.31E+03 |
| BCD_0361 | 1.55E+04 | 2.71E+03 | 2.20E+04 | 2.91E+03 | 2.52E+04 | 1.93E+03 |

[0363] Blank cells indicate that the assay has not yet been performed. Where possible, transduction efficiency was compared to another AAV capsid. These results demonstrate that most of the novel rAAV viral particles are functional in that they are capable of transducing either HEK293, HepG2, and/or U87MG cells with varying efficiencies.

### 6.5.6 Example 6: Evaluation of In Vivo Tropism of Novel rAAV Viral Particles in Mice

[0364] An in vivo imaging system (IVIS) assay was conducted to investigate the tropism of selected novel rAAV viral particles in mice.

Production of rAAV Viral Particle with Reporter Gene:

[0365] rAAV comprising the novel VP1, VP2, and VP3 capsids sequences and expressing the luciferase transgene were generated (AAV-RSV-efp-T2A-Fluc2).

### In Vivo Tissue Expression Assay:

[0366] Male Balb/C or C57BL mice were purchased from Charles River Breeding Laboratories. A dose of 2×10¹³ vg/kg of AAV-RSV-egfp-T2A-Fluc2 vector was injected into the tail vein of 8 week old mice.

### IVIS Lumina LT Imaging:

[0367] At 3- and 5-weeks post injection, in vivo bioluminescent imaging was performed using an in vivo imagining device (IVIS Lumina LT obtained from PerkinElmer Inc., Waltham, MA). In brief, the mice were anesthetized with 2% isofluorane and oxygen. 150 μl of 30 mg/ml of RediJect D-Luciferin Bioluminescent Substrate was injected intraperitoneally. Ten minutes after substrate injection, the animals were imaged with IVIS Lumina LT system, equipped with a cooled charge-coupled device (CCD) camera. Images were taken in the dorsal positions of the animals. Anesthesia was maintained throughout the entire imaging session by isofluorane-oxygen delivery in the light-tight imaging chamber. The mice were sacrificed after the imaging sessions at 5 weeks post AAV injection. Organs from the animals were immediately harvested and imaged using IVIS Lumina LT system. The measurement conditions were the same as those used for in vivo imaging.

[0368] For imaging, a gray-scale photograph of the animals was acquired, followed by bioluminescence image acquisition. Image data was processed and analyzed using Living Image Software® version 4.5.2 (PerkinsElmer Waltham, MA). Regions of interest were traced surrounding each animal as well as individual organs to quantify the total flux (TF) (photons/second) being released by luciferase activity. Results are shown in Table 7 below. Blank cells indicate that the assay has not yet been performed.

TABLE 7
IVIS biodistribution data in presented as total flux in tissue
(photons/sec/cm2/radian): presented as average AVG with standard deviation (SD)
Table 7: Branch 2 Total Flux in Tissue (photons/sec/cm2/radian): presented as AVG/(SD)

| Name | Biceps Brachii | Brain | Diaphragm | Eyes | Gastrocnemius |
|---|---|---|---|---|---|
| AAV-8 | 1.91E+05 | 2.31E+06 | | | 6.87E+06 |
| | (1.55E+04) | (7.88E+05) | | | (4.71E+06) |
| AAV-6 | 1.72E+03 | 5.72E+03 | 9.13E+04 | 4.56E+03 | 1.68E+04 |
| | (2.34E+03) | (3.77E+03) | (6.95E+04) | (2.91E+03) | (2.82E+04) |
| AAV-7 | 4.42E+04 | 1.47E+05 | 9.98E+05 | 6.27E+04 | 7.04E+05 |
| | (4.69E+04) | (1.01E+05) | (1.05E+06) | (3.23E+04) | (6.56E+05) |
| BCD_0386 | 1.93E+06 | 2.92E+05 | 4.78E+07 | 5.97E+05 | 1.01E+08 |
| | (1.01E+06) | (1.93E+05) | (3.12E+07) | (6.74E+05) | (8.42E+07) |
| BCD_0159 | 2.78E+06 | 5.48E+04 | 2.24E+07 | 7.88E+04 | 1.03E+07 |
| | (1.06E+06) | (1.69E+04) | (1.13E+07) | (5.23E+04) | (7.89E+06) |
| BCD_0190 | 7.87E+07 | 2.95E+05 | 1.02E+08 | 2.86E+05 | 1.68E+08 |
| | (5.46E+07) | (1.71E+05) | (6.43E+07) | (2.76E+05) | (7.53E+07) |
| BCD_0106 | 9.18E+03 | 1.24E+05 | 5.11E+06 | 8.55E+03 | 1.86E+06 |
| | (2.07E+03) | (4.22E+04) | (5.26E+06) | (6.88E+03) | (1.26E+06) |
| AAV-9 | 1.34E+07 | 4.94E+05 | 9.75E+07 | 1.31E+05 | 1.32E+08 |
| | (2.59E+07) | (2.31E+05) | (4.58E+07) | (6.75E+04) | (1.37E+08) |
| BCD_0126 | 5.56E+05 | 5.17E+05 | 3.10E+07 | 7.21E+04 | 3.57E+07 |
| | (2.26E+05) | (1.96E+05) | (2.42E+07) | (2.00E+04) | (2.24E+07) |
| BCD_0127 | 6.65E+04 | 2.25E+05 | 5.59E+06 | 1.73E+04 | 1.97E+07 |
| | (2.91E+04) | (6.03E+04) | (3.41E+06) | (1.59E+04) | (2.00E+07) |
| BCD_0146 | 5.43E+04 | 1.10E+05 | 2.90E+06 | 1.58E+04 | 1.58E+07 |
| | (3.57E+04) | (4.10E+04) | (1.22E+06) | (5.68E+03) | (2.04E+07) |
| BCD_0177 | 1.12E+05 | 1.15E+05 | 7.16E+06 | 2.70E+04 | 6.91E+06 |
| | (4.82E+04) | (3.69E+04) | (1.93E+06) | (1.38E+04) | (5.19E+06) |
| BCD_0181 | 2.11E+05 | 1.68E+05 | 1.02E+07 | 2.28E+04 | 2.65E+07 |
| | (1.34E+05) | (7.47E+04) | (4.72E+06) | (3.10E+04) | (2.14E+07) |
| BCD_0187 | 2.24E+05 | 3.01E+05 | 1.99E+07 | 3.78E+04 | 6.21E+07 |
| | (1.17E+05) | (7.50E+04) | (1.64E+07) | (3.30E+04) | (6.14E+07) |
| BCD_0160 | 2.35E+06 | 4.61E+05 | 7.64E+07 | 1.55E+05 | 1.24E+08 |
| | (1.72E+06) | (1.26E+05) | (5.23E+07) | (7.66E+04) | (8.20E+07) |
| BCD_0361 | 1.36E+04 | 8.85E+04 | 9.85E+05 | 1.75E+04 | 1.51E+06 |
| | (5.21E+03) | (6.33E+04) | (2.90E+05) | (2.19E+04) | (2.35E+06) |

| | | | | | Lymph |
|---|---|---|---|---|---|
| Name | Heart | Kidneys | Liver | Lung | Nodes |
| AAV-8 | 6.57E+06 | 2.63E+06 | 4.58E+08 | 4.83E+06 | |
| | (1.71E+06) | (5.58E+05) | (1.82E+08) | (2.34E+06) | |
| AAV-6 | 7.61E+04 | 1.87E+04 | 9.23E+06 | 6.60E+04 | 1.32E+04 |
| | (3.87E+04) | (1.14E+04) | (5.37E+06) | (4.18E+04) | (7.09E+03) |
| AAV-7 | 8.04E+05 | 1.13E+06 | 1.47E+08 | 1.03E+06 | 3.38E+06 |
| | (4.69E+05) | (1.01E+06) | (5.58E+07) | (6.64E+05) | (1.33E+06) |
| BCD_0386 | 9.97E+06 | 1.81E+05 | 5.14E+06 | 4.22E+05 | 1.54E+06 |
| | (6.03E+06) | (6.19E+04) | (3.25E+06) | (9.40E+04) | (9.64E+05) |
| BCD_0159 | 3.51E+06 | 8.50E+05 | 3.49E+06 | 2.72E+05 | |
| | (2.77E+06) | (9.48E+05) | (2.30E+06) | (1.88E+05) | |
| BCD_0190 | 7.96E+06 | 6.89E+05 | 3.52E+07 | 5.80E+05 | |
| | (4.42E+06) | (3.77E+05) | (1.85E+07) | (1.20E+05) | |
| BCD_0106 | 4.51E+05 | 7.21E+05 | 4.14E+08 | 2.60E+06 | |
| | (1.46E+05) | (3.19E+05) | (5.24E+07) | (8.09E+05) | |
| AAV-9 | 2.62E+07 | 3.95E+05 | 5.33E+07 | 1.47E+06 | |
| | (1.52E+07) | (1.15E+05) | (3.16E+07) | (8.65E+05) | |
| BCD_0126 | 2.36E+07 | 1.32E+06 | 2.99E+08 | 2.56E+06 | |
| | (9.68E+06) | (4.39E+05) | (2.92E+07) | (3.39E+05) | |
| BCD_0127 | 3.38E+06 | 3.77E+05 | 2.50E+08 | 9.17E+05 | |
| | (1.86E+06) | (1.68E+05) | (9.05E+07) | (1.78E+05) | |
| BCD_0146 | 2.72E+06 | 1.44E+05 | 7.56E+07 | 3.11E+05 | |
| | (2.23E+06) | (1.14E+05) | (1.70E+07) | (1.11E+05) | |
| BCD_0177 | 2.75E+06 | 3.39E+05 | 8.99E+07 | 8.86E+05 | |
| | (1.10E+06) | (7.10E+04) | (3.93E+07) | (4.67E+05) | |
| BCD_0181 | 5.67E+06 | 7.71E+05 | 1.32E+08 | 1.04E+06 | |
| | (1.13E+06) | (2.92E+05) | (5.94E+07) | (2.78E+05) | |
| BCD_0187 | 1.10E+07 | 4.75E+05 | 1.74E+08 | 1.10E+06 | |
| | (3.74E+06) | (1.85E+05) | (6.08E+07) | (3.36E+05) | |
| BCD_0160 | 2.15E+07 | 1.73E+06 | 2.90E+07 | 1.97E+06 | |
| | (7.33E+06) | (1.05E+06) | (9.98E+06) | (1.08E+06) | |
| BCD_0361 | 5.51E+05 | 1.73E+05 | 1.29E+08 | 6.07E+05 | |
| | (9.95E+04) | (6.13E+04) | (2.70E+07) | (1.79E+05) | |
| | Masseter | Mesenteric | | | |
| Name | muscle | Fat | Pancreas | Quadriceps | Skin |
| AAV-8 | | | | 9.25E+06 | |
| | | | | (4.83E+06) | |
| AAV-6 | 8.87E+02 | | 2.18E+04 | 3.19E+04 | 1.80E+04 |
| | (3.36E+03) | | (1.23E+04) | (4.26E+04) | (5.85E+03) |
| AAV-7 | 1.25E+05 | | 4.60E+05 | 6.52E+05 | 5.78E+04 |
| | (7.30E+04) | | (1.57E+05) | (5.11E+05) | (1.94E+04) |
| BCD_0386 | 7.03E+06 | | 8.68E+04 | 9.11E+07 | 2.59E+06 |
| | (4.03E+06) | | (3.13E+04) | (5.22E+07) | (2.01E+06) |
| BCD_0159 | 3.24E+06 | 2.48E+06 | 3.74E+04 | | 3.70E+05 |
| | (1.06E+06) | (2.56E+06) | (3.12E+04) | | (1.26E+05) |
| BCD_0190 | 2.75E+07 | 8.22E+06 | 1.65E+05 | | 2.77E+06 |
| | (2.30E+07) | (6.17E+06) | (1.85E+05) | | (1.76E+06) |
| BCD_0106 | 6.77E+04 | 3.81E+05 | 1.07E+06 | | 1.91E+04 |
| | (3.44E+04) | (4.75E+04) | (1.74E+05) | | (5.15E+03) |
| AAV-9 | 9.05E+06 | 1.51E+06 | 4.91E+05 | | 1.66E+06 |
| | (3.97E+06) | (8.73E+05) | (5.19E+05) | | (1.11E+06) |
| BCD_0126 | 8.85E+06 | 4.64E+06 | 1.06E+06 | | 6.58E+05 |
| | (4.68E+06) | (2.27E+06) | (6.55E+05) | | (2.75E+05) |
| BCD_0127 | 1.41E+06 | 3.04E+06 | 6.87E+05 | | 3.88E+05 |
| | (4.17E+05) | (1.66E+06) | (3.01E+05) | | (4.28E+05) |
| BCD_0146 | 4.80E+05 | 2.16E+05 | 2.10E+05 | | 2.93E+05 |
| | (3.91E+05) | (4.22E+04) | (9.79E+04) | | (2.71E+05) |
| BCD_0177 | 1.22E+06 | 2.21E+06 | 2.79E+05 | | 3.39E+05 |
| | (8.29E+05) | (9.55E+05) | (1.12E+05) | | (1.36E+05) |
| BCD_0181 | 5.41E+06 | 7.85E+05 | 4.01E+05 | | 3.89E+05 |
| | (4.45E+06) | (5.20E+05) | (1.72E+05) | | (1.42E+05) |
| BCD_0187 | 6.15E+06 | 3.24E+06 | 6.56E+05 | | 6.53E+05 |
| | (3.01E+06) | (8.81E+05) | (1.26E+05) | | (4.65E+05) |
| BCD_0160 | 1.00E+07 | 3.05E+06 | 2.07E+05 | | 9.08E+05 |
| | (9.58E+06) | (3.35E+06) | (9.27E+04) | | (4.61E+05) |
| BCD_0361 | 6.14E+04 | 1.45E+06 | 5.79E+05 | | 4.25E+04 |
| | (3.40E+04) | (5.21E+05) | (6.35E+05) | | (2.05E+04) |

| Name | Soleus | Spleen | Tibialis Anterior | Tongue |
|---|---|---|---|---|
| AAV-8 | | 7.34E+05 | | |
| | | (2.84E+05) | | |
| AAV-6 | | 4.98E+03 | 2.09E+04 | 7.27E+02 |
| | | (4.23E+03) | (1.44E+04) | (1.57E+03) |
| AAV-7 | | 1.47E+05 | 1.21E+05 | 4.45E+04 |
| | | (4.00E+04) | (9.65E+04) | (4.56E+04) |
| BCD_0386 | 1.90E+06 | 3.71E+04 | 1.90E+07 | 4.16E+06 |
| | (1.46E+06) | (2.05E+04) | (1.03E+07) | (1.98E+06) |
| BCD_0159 | | 3.73E+04 | 2.19E+06 | |
| | | (3.34E+04) | (1.52E+06) | |
| BCD_0190 | | 7.22E+04 | 3.45E+07 | |
| | | (7.59E+04) | (1.94E+07) | |
| BCD_0106 | | 7.77E+05 | 7.48E+04 | |
| | | (1.40E+05) | (4.82E+04) | |
| AAV-9 | | 1.82E+05 | 1.08E+07 | |
| | | (1.04E+05) | (1.14E+07) | |
| BCD_0126 | | 4.04E+05 | 2.65E+06 | |
| | | (1.04E+05) | (1.00E+06) | |
| BCD_0127 | | 2.23E+05 | 5.70E+05 | |
| | | (7.12E+04) | (3.42E+05) | |
| BCD_0146 | | 5.50E+04 | 1.85E+06 | |
| | | (3.17E+04) | (1.81E+06) | |
| BCD_0177 | | 1.73E+05 | 5.78E+05 | |
| | | (3.08E+04) | (3.22E+05) | |
| BCD_0181 | | 1.10E+05 | 1.52E+06 | |
| | | (7.07E+04) | (1.51E+06) | |
| BCD_0187 | | 1.96E+05 | 2.04E+06 | |
| | | (8.84E+04) | (5.57E+05) | |
| BCD_0160 | | 6.99E+04 | 8.37E+06 | |
| | | (4.71E+04) | (4.61E+06) | |
| BCD_0361 | | 1.33E+05 | 5.62E+04 | |
| | | (2.52E+04) | (5.68E+04) | |

[0369] Total flux activity observed in Table 7 is a proxy for AAV viral tropism (i.e., tissue/organ infectivity). A log or more difference in the average (photons/see/cm²/radian) for a specific tissue type/organ, compared to another AAV capsid indicates a significant increase or decrease in tropism/infectivity. These data show that AAV harboring specific novel capsid proteins demonstrate different tissue specificities/tropism profiles.

### 6.5.7 Example 7: Evaluation of Novel rAAV Viral Particles in Non-Human Primates

[0370] Non-human primate studies are conducted with cynomolgus monkeys (Macaca fascicularis) to evaluate the ability of a novel rAAV viral particle to transduce and express in various organs and tissue types.

Novel rAAV Viral Particles:

[0371] rAAV viral particles comprising a novel capsid protein sequence, see Table 9, and a βCG transgene are produced as provided in Example 3 above.

### Study Protocol:

[0372] Study groups (n=3) include vehicle and various doses, high dose “HD” and low dose “LD” of AAV virions containing a coding sequence for a gene. Efficacy endpoints include a run in of 3-4 weeks of weekly bleeds (plasma) for each animal baseline reads then weekly bleeds for a 8-13 weeks study. Efficacy is evaluated by plasma and tissue gene of interest activity and protein levels.

[0373] Clinical pathology and hematology readouts are monitored. Safety endpoints include weekly physical, and body weight measurements, as well as monitoring for anti-AAV antibody and anti-gene responses (e.g., therapeutic transgene or target thereof) and liver enzyme levels such as, ALT. The primates are monitored for adverse clinical signs, and if seen additional analyses are performed. At the time of study termination gross necropsy is performed and all major organs are assessed for gene of interest activity, protein, and pathology by quantitative polymerase chain reaction (qPCR) and immunohistochemistry (IHC).

[0374] Both qPCR and IHC assays show that rAAV viral particles comprising the novel capsid protein yield high BCG-positive expression in the organ which the novel AAV capsid shows enhanced tropism/delivery for, and low BCG-positive expression in the de-targeted cells.

6.5.8 Example 8A: Ex Vivo Evaluation of Novel rAAV Viral Particles Tropism in Brain Tissue

[0375] Studies using selected rAAVs and/or novel rAAV viral particles of the disclosure are conducted with ex vivo brain slices to evaluate their tropism for the brain.

Animals and Novel AAV Vector or rAAV Vector Genome:

[0376] Either non-human primate (Macaca nemestrina), C57BL/6 mice are used for this study. Novel AAV vectors or rAAV vector genomes comprising the novel AAV capsid sequences in Table 9 and/or other AAVs, a hSyn1 promoter, are tagged with either GFP or YFP are prepared as described in the examples above.

### Media and Reagents:

[0377] NMDG-HEPES aCSF (in mM): 92 NMDG, 2.5 KCl, 1.25 NaH2PO4, 30 NaHCO3, 20 HEPES, 25 glucose, 2 thiourea, 5 Na-ascorbate, 3 Na-pyruvate, 0.5 CaCl2·2H2O, and 10 MgSO4·7H2O. Titrate pH to 7.3-7.4 with 17 mL+/−0.5 mL of 5 M hydrochloric acid.

[0378] HEPES holding aCSF (in mM): 92 NaCl, 2.5 KCl, 1.25 NaH2PO4, 30 NaHCO3, 20 HEPES, 25 glucose, 2 thiourea, 5 Na-ascorbate, 3 Na-pyruvate, 2 CaCl2·2H2O, and 2 MgSO4·7H2O. Titrate pH to 7.3-7.4 with concentrated 10 N NaOH.

[0379] Recording aCSF (in mM): 124 NaCl, 2.5 KCl, 1.25 NaH2PO4, 24 NaHCO₃, 12.5 glucose, 5 HEPES, 2 CaCl2·2H2O, and 2 MgSO4·7H2O. Titrate pH to 7.3-7.4 concentrated 10 N NaOH.

[0380] Na+ spike-in solution (2 M): 580 mg of NaCl is dissolved in 5 mL of freshly prepared NMDG-HEPES aCSF.

[0381] 2% agarose for tissue embedding: 2 g of agarose type 1B is dissolved in 100 mL of 1×PBS and microwaved until just boiling and swirled to mix. The mixture is poured into a sterile 10 cm Petri dishes and allowed to solidify. The agarose plate is stored in a sealed plastic bag at 4° C. until use.

[0382] Injectable anesthetic working stock solution: 2.5 g of 2,2,2-Tribromoethanol is mixed with 5 mL of 2-methyl-2-butanol. Next, the mixture is gradually dissolved into 200 mL PBS, pH 7.0-7.3 and filtered with a 0.22 μm filter before use and stored at 4° C., protected from light.

### Slicing Station:

[0383] A 250 ml beaker is filled with 200 mL of NMDG-HEPES aCSF and pre-chilled on ice with constant carbogenation (applied via a gas diffuser stone immersed in the media) for >10 min. The initial brain slice recovery chamber is filled with 150 mL of NMDG-HEPES aCSF (maintain constant carbogenation) and the chamber is placed into a heated water bath maintained at 32-34° C. A slice chamber after the design of Edwards and Konnerth (1992) Methods Enzymol. 207:208-22 is used. The netting is submerged approximately 1 cm under the liquid surface. The reservoir is filled with 450 mL of HEPES aCSF and warmed to room temperature under constant carbogenation until use.

[0384] Molten agarose is prepared for tissue embedding. The open end of a 50 ml conical vial is used to cut out a block of 2% agarose from the previously prepared dish. The conical vial is microwaved until the agarose is just melted. The molten agarose is poured into 1.5 mL tubes. The agarose is maintained in the molten state using a thermomixer set to 42° C. with vigorous shaking.

### Transcardial Perfusion:

[0385] Deeply anesthetize mice by intraperitoneal injection of anesthetic working stock solution (250 mg/kg: 0.2 mL of 1.25% anesthetic working stock solution per 10 g body weight). After ˜2-3 min, sufficient depth of anesthesia is verified by toe pinch reflex test.

[0386] A 30 ml syringe is loaded with 25 mL of carbogenated NMDG-HEPES aCSF from the pre-chilled (2-4° C.) 250 ml beaker. A 25 5/8 gauge needle is attached. The needle of the 30 mL syringe is inserted into the left ventricle and the right atrium is cut with fine scissors to allow blood to exit the heart. The syringe plunger is depressed using constant pressure and perfuse the animal with the chilled NMDG-HEPES aCSF at a rate of ˜10 mL/min.

### Brain Dissection and Slicing:

[0387] Animals are decapitated. Next, a scalpel is used to open the skin on the head and to expose the skull cap. Fine super-cut scissors are used to cut away the skin over the skull cap and to make small incisions laterally on either side at the caudal/ventral base of the skull. Additional shallow cuts are made starting at the caudal/dorsal aspect of the skull moving in the rostral direction up the dorsal midline. Finally, a ‘T’ cut perpendicular to the midline at the level of the olfactory bulbs is made.

[0388] Round-tip forceps are used to grasp the skull starting at the rostral-medial aspect and peel back towards the caudal-lateral direction. This step is repeated for both sides to crack open and remove the dorsal halves of the skull cap to expose the brain. The intact brain is scooped out and placed into the beaker of pre-chilled NMDG-HEPES aCSF and allowed to cool for approximately 1 min.

[0389] A large spatula is used to lift the brain out of the beaker and onto a petri dish covered with filter paper. The brain is trimmed and blocked to the preferred angle of slicing and desired brain region of interest.

[0390] The brain block is affixed to the specimen holder using adhesive glue. Next, the inner piece of the specimen holder is retracted to withdraw the brain block fully inside. Molten agarose is poured directly into the holder until the brain block is fully covered in agarose. A pre-cooled accessory chilling block is clamped around the specimen holder for ˜10 secs until the agarose is solidified.

[0391] The specimen holder is inserted into the receptacle on the slicer machine and proper alignment is verified. The reservoir is filled with remaining pre-chilled, oxygenated NMDG-HEPES aCSF with a bubble stone placed inside for the duration of slicing to ensure adequate oxygenation.

[0392] The micrometer is adjusted to slice the embedded brain specimen. The slicer is empirically adjusted for the advance speed and oscillation frequency and tissue is sliced in 300 μm increments until the region of interest is fully sectioned.

### Optimized NMDG Protective Recovery Procedure:

[0393] The slices are collected using a cut-off plastic Pasteur pipet and transferred into a pre-warmed (34° C.) initial recovery chamber filled with 150 mL of NMDG-HEPES aCSF. Transfer all slices in short succession and start a timer as soon as all slices are moved into the recovery chamber.

[0394] Next, a stepwise Na+ spike-in procedure is conducted by adding the indicated volumes of Na+ spike-in solution at the indicated times directly into the bubbler chimney of the initial recovery chamber.

[0395] The slices are transferred to the HEPES aCSF long-term holding chamber and then maintained at room temperature. Slices are allowed to recover for an additional 1 hour in the HEPES holding chamber prior to initiating experiments. Visualization of YFP or GFP expression in the brain slice is conducted by epifluorescence microscopy and/or IHC detection of the YFP or GFP protein.

[0396] Positive YFP or GFP expressing neuronal cells by either epifluorescence microscopy and/or IHC detection, as compared to a positive and negative controls, would indicate that the selected novel rAAV viral particles have neuronal tropism in brain tissue.

### 6.5.9 Example 8B: Ex Vivo Evaluation of Novel rAAV Viral Particles Tropism in Brain Tissue

[0397] Studies were conducted using selected rAAVs, including novel rAAV viral particles of the disclosure, with ex vivo brain slices to further evaluate their putative tropism for the brain.

Animals and Novel AAV Vector or rAAV Vector Genome:

[0398] Either non-human primate (Macaca nemestrina), C57BL/6 mice, or human brain tissue were used for this study. rAAV vectors and vector genomes comprising the novel AAV capsid sequences in Table 10 or selected rAAVs with the vector the CN1839-rAAV-hSyn1-SYFP2-10aa-H2B-WPRE3-BGHpA (Addgene plasmid #163509; http://n2t.net/addgene: 163509; RRID: Addgene_163509) and were prepared as described in the examples above.

### Media and Reagents:

[0399] NMDG-HEPES aCSF (in mM): 92 NMDG, 2.5 KCl, 1.25 NaH2PO4, 30 NaHCO3, 20 HEPES, 25 glucose, 2 thiourea, 5 Na-ascorbate, 3 Na-pyruvate, 0.5 CaCl2·2H2O, and 10 MgSO4·7H2O. Titrate pH to 7.3-7.4 with 17 mL+/−0.5 mL of 5 M hydrochloric acid.

[0400] HEPES holding aCSF (in mM): 92 NaCl, 2.5 KCl, 1.25 NaH2PO4, 30 NaHCO₃, 20 HEPES, 25 glucose, 2 thiourea, 5 Na-ascorbate, 3 Na-pyruvate, 2 CaCl2·2H2O, and 2 MgSO4·7H2O. Titrate pH to 7.3-7.4 with concentrated 10 N NaOH.

[0401] Recording aCSF (in mM): 124 NaCl, 2.5 KCl, 1.25 NaH2PO4, 24 NaHCO3, 12.5 glucose, 5 HEPES, 2 CaCl2·2H2O, and 2 MgSO4.7H2O. Titrate pH to 7.3-7.4 concentrated 10 N NaOH.

[0402] Na+ spike-in solution (2 M): 580 mg of NaCl was dissolved in 5 mL of freshly prepared NMDG-HEPES aCSF.

[0403] 2% agarose for tissue embedding: 2 g of agarose type 1B was dissolved in 100 mL of 1×PBS and microwaved until just boiling and swirled to mix. The mixture was poured into a sterile 10 cm Petri dishes and allowed to solidify. The agarose plate was stored in a sealed plastic bag at 4° C. until use.

[0404] Injectable anesthetic working stock solution: 2.5 g of 2,2,2-Tribromoethanol was mixed with 5 mL of 2-methyl-2-butanol. Next, the mixture was gradually dissolved into 200 mL PBS, pH 7.0-7.3 and filtered with a 0.22 μm filter before use and stored at 4° C., protected from light.

### Slicing Station:

[0405] A 250 ml beaker was filled with 200 mL of NMDG-HEPES aCSF and pre-chilled on ice with constant carbogenation (applied via a gas diffuser stone immersed in the media) for >10 min. The initial brain slice recovery chamber was filled with 150 mL of NMDG-HEPES aCSF (maintain constant carbogenation) and the chamber was placed into a heated water bath maintained at 32-34° C. A slice chamber after the design of Edwards and Konnerth (1992) Methods Enzymol. 207:208-22 was used. The netting was submerged approximately 1 cm under the liquid surface. The reservoir was filled with 450 mL of HEPES aCSF and warmed to room temperature under constant carbogenation until use.

[0406] Molten agarose was prepared for tissue embedding. The open end of a 50 ml conical vial was used to cut out a block of 2% agarose from the previously prepared dish. The conical vial was microwaved until the agarose was just melted. The molten agarose was poured into 1.5 mL tubes. The agarose was maintained in the molten state using a thermomixer set to 42° C. with vigorous shaking.

### Transcardial Perfusion:

[0407] Deeply anesthetize mice by intraperitoneal injection of anesthetic working stock solution (250 mg/kg: 0.2 mL of 1.25% anesthetic working stock solution per 10 g body weight). After ˜2-3 min, sufficient depth of anesthesia was verified by toe pinch reflex test.

[0408] A 30 ml syringe was loaded with 25 mL of carbogenated NMDG-HEPES aCSF from the pre-chilled (2-4° C.) 250 ml beaker. A 25 5/8 gauge needle was attached. The needle of the 30 ml syringe was inserted into the left ventricle and the right atrium was cut with fine scissors to allow blood to exit the heart. The syringe plunger was depressed using constant pressure and perfuse the animal with the chilled NMDG-HEPES aCSF at a rate of ˜10 mL/min.

### Brain Dissection and Slicing:

[0409] Animals were decapitated. Next, a scalpel was used to open the skin on the head and to expose the skull cap. Fine super-cut scissors were used to cut away the skin over the skull cap and to make small incisions laterally on either side at the caudal/ventral base of the skull. Additional shallow cuts were made starting at the caudal/dorsal aspect of the skull moving in the rostral direction up the dorsal midline. Finally, a ‘T’ cut perpendicular to the midline at the level of the olfactory bulbs was made.

[0410] Round-tip forceps were used to grasp the skull starting at the rostral-medial aspect and peel back towards the caudal-lateral direction. This step was repeated for both sides to crack open and remove the dorsal halves of the skull cap to expose the brain. The intact brain was scooped out and placed into the beaker of pre-chilled NMDG-HEPES aCSF and allowed to cool for approximately 1 min.

[0411] A large spatula was used to lift the brain out of the beaker and onto a petri dish covered with filter paper. The brain was trimmed and blocked to the preferred angle of slicing and desired brain region of interest.

[0412] The brain block was affixed to the specimen holder using adhesive glue. Next, the inner piece of the specimen holder was retracted to withdraw the brain block fully inside. Molten agarose was poured directly into the holder until the brain block was fully covered in agarose. A pre-cooled accessory chilling block was clamped around the specimen holder for ˜10 secs until the agarose was solidified.

[0413] The specimen holder was inserted into the receptacle on the slicer machine and proper alignment was verified. The reservoir was filled with remaining pre-chilled, oxygenated NMDG-HEPES aCSF with a bubble stone placed inside for the duration of slicing to ensure adequate oxygenation.

[0414] The micrometer was adjusted to slice the embedded brain specimen. The slicer was empirically adjusted for the advance speed and oscillation frequency and tissue was sliced in 300 μm increments until the region of interest was fully sectioned.

### Optimized NMDG Protective Recovery Procedure:

[0415] The slices were collected using a cut-off plastic Pasteur pipet and transferred into a pre-warmed (34° C.) initial recovery chamber filled with 150 mL of NMDG-HEPES aCSF. Transfer all slices in short succession and start a timer as soon as all slices were moved into the recovery chamber.

[0416] Next, a stepwise Na+ spike-in procedure was conducted by adding the indicated volumes of Na+ spike-in solution at the indicated times directly into the bubbler chimney of the initial recovery chamber.

[0417] The slices were transferred to the HEPES aCSF long-term holding chamber and then maintained at room temperature. Slices were allowed to recover for an additional 1 hour in the HEPES holding chamber prior to initiating experiments. Visualization of YFP expression in the brain slice is conducted by epifluorescence microscopy and/or IHC detection of the YFP protein.

[0418] Positive YFP expressing neuronal cells by either epifluorescence microscopy and/or IHC detection, as compared to a AAV positive and negative controls, would indicate that the selected novel rAAV viral particles have neuronal tropism in brain tissue.

[0419] Shown in Table 10 is each rAAV's transduction profile for the indicated rAAV virial particle comprising the specified AAV capsid protein (e.g., AAV_ID) ran at least in duplicate and/or triplicate. The expression of the rAAV viral particle was normalized to AAV-9.PHP.eb, where AAV-9.PHP.eb was set to 100% for the given ex vivo model brain tissue slice tested (e.g., mouse, NHP, human). Blank cells have not yet been tested.

TABLE 10
Averaged Normalized rAAV Brain Expression

| AAV_ID | MOUSE | NHP | HUMAN |
|---|---|---|---|
| AAV-1 | 69.74% | 13.40% | |
| AAV-2 | 44.23% | 16.99% | |
| AAV-3b | 7.55% | 3.01% | |
| AAV-7 | 99.70% | 51.96% | |
| AAV-8 | 91.45% | 21.05% | |
| AAV-9 | 75.71% | 66.55% | 53.20% |
| AAV_LK03 | 36.40% | 69.52% | |
| BCD_0106 | 30.12% | 0.65% | |
| BCD_0125 | 54.23% | 38.24% | |
| BCD_0126 | 97.22% | 43.96% | 18.91% |
| BCD_0157 | 39.43% | 14.04% | |
| BCD_0160 | 81.35% | 83.28% | 69.91% |
| BCD_0167 | 28.15% | 48.04% | 46.45% |
| BCD_0174 | | 50.00% | |
| BCD_0176 | 57.62% | 90.36% | 101.72% |
| BCD_0178 | | 22.72% | |
| BCD_0180 | 100.15% | 65.10% | 60.49% |
| BCD_0182 | 75.24% | 32.39% | 64.06% |
| BCD_0185 | 28.67% | 60.34% | 47.38% |
| BCD_0190 | 35.25% | 0.60% | |
| BCD_0192 | | 62.76% | |
| BCD_0193 | 16.45% | 35.62% | |
| BCD_0195 | 69.22% | 80.40% | 50.15% |
| BCD_0196 | | 25.78% | |
| BCD_0198 | | 28.41% | |
| BCD_0270 | 63.90% | 31.28% | |
| BCD_0275 | 70.58% | 16.67% | |
| BCD_0276 | | 29.46% | |
| BCD_0277 | | 50.90% | |
| BCD_0282 | 61.07% | 96.44% | 136.21% |
| BCD_0283 | | 32.35% | |
| BCD_0284 | | 29.48% | |
| BCD_0286 | | 33.36% | |
| BCD_0289 | | 21.87% | |
| BCD_0295 | | 22.76% | |
| BCD_0297 | | 24.39% | |
| BCD_0300 | | 0.49% | |
| BCD_0353 | 54.74% | 6.62% | 3.09% |
| BCD_0360 | 25.81% | 6.38% | |
| BCD_0361 | 24.25% | 5.23% | |
| BCD_0391 | 16.21% | 2.18% | |
| BCD_0395 | 21.33% | 12.29% | |
| BCD_0396 | 10.97% | 18.33% | 6.72% |
| BCD_0446 | | 84.55% | 105.17% |
| BCD_0448 | | 19.51% | |
| BCD_0454 | | 60.16% | 93.10% |
| BCD_0455 | | 27.64% | |
| BMN_0251 | | 5.71% | |
| BMN_0258 | | 0.52% | |
| BMN_0271 | | 49.69% | |
| BMN_0272 | 55.51% | 50.40% | |
| BMN_0273 | | 10.00% | |
| BMN_0304 | | 16.01% | |
| BMN_0308 | 6.82% | 46.08% | |

[0420] The expression observed in Table 10 is a proxy for AAV viral tropism (i.e., tissue/organ infectivity in the brain). rAAVs with about 30% to about 50% or higher averaged normalized expression in the ex vivo brain slice assay are of particular interest. Alternatively, rAAVs with about 50% or higher averaged normalized expression in the ex vivo brain slice assay are of particular interest.

### 6.5.10 Example 9: Determining Variable Regions of a Novel AAV VP1 Capsid Protein

[0421] The associated variable regions, VR1-VRIX, GBS, and GH loop of the novel AAV VP1 capsid protein sequences are determined.

[0422] Briefly, a multiple sequence alignment is conducted using the VP1 amino acid sequences of a novel AAV capsid protein of the disclosure with different reference AAV serotypes, see for example, Table 4, using sequence alignment software provided herein.

[0423] Table 8 below, provides an example of previously described AAV capsid variable regions as published in International Application No. WO 2018/022608. The numbers indicated in the table refer to the amino acid residues representing each variable region (“VR”), GBS, and GH loop regions of the indicated AAV capsid sequence spanning its VP1 amino acid sequence.

[0424] In regards to the amino acid described locations of the VR, GBS and GH loop regions, it is noted that the location of the N-terminal and/or C-terminal ends of those regions may vary by from up to 1 amino acid, 2 amino acids, 3 amino acids, 4 amino acids, or 5 amino acids from the amino acid locations of those regions as they are explicitly described herein (particularly in Table 8).

TABLE 8
Associated AAV Capsid Variable Regions

| | VR- | VR- | VR- | VR- | | VR- | VR- | VR- | VR- | VR- | GH |
|---|---|---|---|---|---|---|---|---|---|---|---|
| AAV | I | II | III | IV | GBS | V | VI | VII | VIII | IX | loop |
| AAV-2 | 262- | 325- | 380- | 450- | 464- | 487- | 526- | 544- | 580- | 703- | 446- |
| | 268 | 330 | 384 | 459 | 475 | 504 | 538 | 557 | 592 | 711 | 600 |
| AAV-4 | 256- | 316- | 372- | 444- | 459- | 481- | 526- | 542- | 579- | 702- | 440- |
| | 260 | 321 | 378 | 454 | 470 | 504 | 536 | 556 | 591 | 710 | 599 |
| AAV-5 | 252- | 316- | 372- | 443- | 452- | 474- | 513- | 531- | 570- | 692- | 439- |
| | 258 | 321 | 377 | 446 | 462 | 491 | 525 | 547 | 582 | 700 | 590 |
| AAV-6 | 262- | 326- | 381- | 451- | 465- | 488- | 527- | 545- | 581- | 704- | 447- |
| | 269 | 331 | 385 | 460 | 476 | 505 | 539 | 558 | 593 | 712 | 601 |
| AAV-6.2 | 262- | 326- | 381- | 451- | 465- | 488- | 527- | 545- | 581- | 704- | 447- |
| | 269 | 331 | 385 | 460 | 476 | 505 | 539 | 558 | 593 | 712 | 601 |
| AAV-7 | 263- | 327- | 382- | 452- | 467- | 490- | 529- | 547- | 582- | 705- | 448- |
| | 270 | 332 | 386 | 462 | 478 | 507 | 541 | 559 | 594 | 713 | 602 |
| AAV-8 | 263- | 328- | 383- | 453- | 467- | 490- | 529- | 548- | 583- | 706- | 449- |
| | 271 | 333 | 387 | 462 | 478 | 507 | 541 | 560 | 595 | 714 | 603 |
| AAV-9 | 262- | 327- | 382- | 452- | 465- | 488- | 527- | 545- | 581- | 704- | 448- |
| | 270 | 332 | 386 | 460 | 476 | 505 | 539 | 558 | 593 | 712 | 602 |
| AAVrh8 | 262- | 327- | 382- | 452- | 465- | 488- | 527- | 545- | 581- | 704- | 448- |
| | 270 | 332 | 386 | 460 | 476 | 505 | 539 | 558 | 593 | 712 | 602 |
| AAVrh10 | 263- | 328- | 383- | 453- | 467- | 490- | 529- | 548- | 583- | 706- | 449- |
| | 271 | 333 | 387 | 462 | 478 | 507 | 541 | 560 | 595 | 714 | 603 |
| AAVbo | 258- | 318- | 374- | 446- | 462- | 484- | 528- | 544- | 581- | 704- | 442- |
| | 262 | 323 | 380 | 456 | 472 | 506 | 538 | 558 | 593 | 712 | 601 |
| BMN_0219 | 265- | 325- | 381- | 452- | 468- | 490- | 534- | 550- | 587- | 710- | 448- |
| (Bba. 21) | 269 | 330 | 386 | 462 | 478 | 512 | 544 | 564 | 599 | 718 | 607 |
| BMN_0220 | 265- | 325- | 381- | 452- | 468- | 490- | 534- | 550- | 587- | 710- | 448- |
| (Bba. 31) | 269 | 330 | 386 | 462 | 478 | 512 | 544 | 564 | 599 | 718 | 607 |
| BMN_0221 | 265- | 325- | 381- | 452- | 468- | 490- | 534- | 550- | 587- | 710- | 448- |
| (Bba. 32) | 269 | 330 | 386 | 462 | 478 | 512 | 544 | 564 | 599 | 718 | 607 |
| BMN_0222 | 265- | 325- | 381- | 452- | 468- | 490- | 534- | 550- | 587- | 710- | 448- |
| (Bba. 33) | 269 | 330 | 386 | 462 | 478 | 512 | 544 | 564 | 599 | 718 | 607 |
| BMN_0322 | 243- | 307- | 363- | 434- | 443- | 465- | 505- | 523- | 562- | 684- | 430- |
| (Bpo. 1) | 249 | 312 | 368 | 437 | 453 | 483 | 517 | 539 | 574 | 692 | 582 |
| BMN_0323 | 243- | 307- | 363- | 434- | 443- | 465- | 505- | 523- | 562- | 684- | 430- |
| (Bpo. 2) | 249 | 312 | 368 | 437 | 453 | 483 | 517 | 539 | 574 | 692 | 582 |
| BMN_0324 | 243- | 307- | 363- | 434- | 443- | 465- | 505- | 523- | 562- | 684- | 430- |
| (Bpo. 3) | 249 | 312 | 368 | 437 | 453 | 483 | 517 | 539 | 574 | 692 | 582 |
| BMN_0325 | 243- | 307- | 363- | 434- | 443- | 465- | 505- | 523- | 562- | 684- | 430- |
| (Bpo. 4) | 249 | 312 | 368 | 437 | 453 | 483 | 517 | 539 | 574 | 692 | 582 |
| BMN_0326 | 243- | 307- | 363- | 434- | 443- | 465- | 505- | 523- | 562- | 684- | 430- |
| (Bpo. 6) | 249 | 312 | 368 | 437 | 453 | 483 | 517 | 539 | 574 | 692 | 582 |
| BMN_0327 | 243- | 307- | 363- | 434- | 443- | 465- | 505- | 523- | 562- | 684- | 430- |
| (Bpo. 8) | 249 | 312 | 368 | 437 | 453 | 483 | 517 | 539 | 574 | 692 | 582 |
| BMN_0328 | 243- | 307- | 363- | 434- | 443- | 465- | 505- | 523- | 562- | 684- | 430- |
| (Bpo. 13) | 249 | 312 | 368 | 437 | 453 | 483 | 517 | 539 | 574 | 692 | 582 |
| BMN_0329 | 243- | 307- | 363- | 434- | 443- | 465- | 505- | 523- | 562- | 684- | 430- |
| (Bpo. 18) | 249 | 312 | 368 | 437 | 453 | 483 | 517 | 539 | 574 | 692 | 582 |
| BMN_0330 | 243- | 307- | 363- | 434- | 443- | 465- | 505- | 523- | 562- | 684- | 430- |
| (Bpo. 20) | 249 | 312 | 368 | 437 | 453 | 483 | 517 | 539 | 574 | 692 | 582 |
| BMN_0331 | 243- | 307- | 363- | 434- | 443- | 465- | 505- | 523- | 562- | 684- | 430- |
| (Bpo. 23) | 249 | 312 | 368 | 437 | 453 | 483 | 517 | 539 | 574 | 692 | 582 |
| BMN_0332 | 243- | 307- | 363- | 434- | 443- | 465- | 505- | 523- | 562- | 684- | 430- |
| (Bpo. 24) | 249 | 312 | 368 | 437 | 453 | 483 | 517 | 539 | 574 | 692 | 582 |
| BMN_0333 | 243- | 307- | 363- | 434- | 443- | 465- | 505- | 523- | 562- | 684- | 430- |
| (Bpo. 27) | 249 | 312 | 368 | 437 | 453 | 483 | 517 | 539 | 574 | 692 | 582 |
| BMN_0334 | 243- | 307- | 363- | 434- | 443- | 465- | 505- | 523- | 562- | 684- | 430- |
| (Bpo. 28) | 249 | 312 | 368 | 437 | 453 | 483 | 517 | 539 | 574 | 692 | 582 |
| BMN_0335 | 243- | 307- | 363- | 434- | 443- | 465- | 505- | 523- | 562- | 684- | 430- |
| (Bpo. 29) | 249 | 312 | 368 | 437 | 453 | 483 | 517 | 539 | 574 | 692 | 582 |
| BMN_0336 | 243- | 307- | 363- | 434- | 443- | 465- | 505- | 523- | 562- | 684- | 430- |
| (Bpo. 33) | 249 | 312 | 368 | 437 | 453 | 483 | 517 | 539 | 574 | 692 | 582 |
| BMN_0337 | 243- | 307- | 363- | 434- | 443- | 465- | 505- | 523- | 562- | 684- | 430- |
| (Bpo. 35) | 249 | 312 | 368 | 437 | 453 | 483 | 517 | 539 | 574 | 692 | 582 |
| BMN_0338 | 243- | 307- | 363- | 434- | 443- | 465- | 505- | 523- | 562- | 684- | 430- |
| (Bpo. 36) | 249 | 312 | 368 | 437 | 453 | 483 | 517 | 539 | 574 | 692 | 582 |
| BMN_0339 | 243- | 307- | 363- | 434- | 443- | 465- | 505- | 523- | 562- | 684- | 430- |
| (Bpo. 37) | 249 | 312 | 368 | 437 | 453 | 483 | 517 | 539 | 574 | 692 | 582 |
| AAVmo | 249- | 310- | 366- | 437- | 443- | 467- | 507- | 525- | 556- | 679- | 433- |
| | 252 | 315 | 371 | 439 | 455 | 484 | 519 | 533 | 568 | 689 | 576 |
| BMN_0316 | 262- | 327- | 382- | 452- | 465- | 488- | 527- | 545- | 581- | 704- | 448- |
| (Bce. 14) | 270 | 332 | 386 | 460 | 476 | 505 | 539 | 558 | 593 | 712 | 602 |
| BMN_0317 | 262- | 327- | 382- | 452- | 465- | 488- | 527- | 545- | 581- | 704- | 448- |
| (Bce. 15) | 270 | 332 | 386 | 460 | 476 | 505 | 539 | 558 | 593 | 712 | 602 |
| BMN_0318 | 262- | 327- | 382- | 452- | 465- | 488- | 527- | 545- | 581- | 704- | 448- |
| (Bce. 16) | 270 | 332 | 386 | 460 | 476 | 505 | 539 | 558 | 593 | 712 | 602 |
| BMN_0319 | 262- | 327- | 382- | 452- | 465- | 488- | 527- | 545- | 581- | 704- | 448- |
| (Bce. 17) | 270 | 332 | 386 | 460 | 476 | 505 | 539 | 558 | 593 | 712 | 602 |
| BMN_0320 | 262- | 327- | 382- | 452- | 465- | 488- | 527- | 545- | 581- | 704- | 448- |
| (Bce. 18) | 270 | 332 | 386 | 460 | 476 | 505 | 539 | 558 | 593 | 712 | 602 |
| BMN_0321 | 262- | 327- | 382- | 452- | 465- | 488- | 527- | 545- | 581- | 704- | 448- |
| (Bce. 20) | 270 | 332 | 386 | 460 | 476 | 505 | 539 | 558 | 593 | 712 | 602 |
| BMN_0314 | 262- | 327- | 382- | 452- | 465- | 488- | 527- | 545- | 581- | 704- | 448- |
| (Bma. 42) | 270 | 332 | 386 | 460 | 476 | 505 | 539 | 558 | 593 | 712 | 602 |
| BMN_0315 | 262- | 327- | 382- | 452- | 465- | 488- | 527- | 545- | 581- | 704- | 448- |
| (Bma. 43) | 270 | 332 | 386 | 460 | 476 | 505 | 539 | 558 | 593 | 712 | 602 |
| BMN_0302 | 262- | 327- | 382- | 452- | 465- | 488- | 527- | 545- | 581- | 704- | 448- |
| (Bce. 39) | 270 | 332 | 386 | 460 | 476 | 505 | 539 | 558 | 593 | 712 | 602 |
| BMN_0303 | 262- | 327- | 382- | 452- | 465- | 488- | 527- | 545- | 581- | 704- | 448- |
| (Bce. 40) | 270 | 332 | 386 | 460 | 476 | 505 | 539 | 558 | 593 | 712 | 602 |
| BMN_0304 | 262- | 327- | 382- | 452- | 465- | 488- | 527- | 545- | 581- | 704- | 448- |
| (Bce. 41) | 270 | 332 | 386 | 460 | 476 | 505 | 539 | 558 | 593 | 712 | 602 |
| BMN_0305 | 262- | 327- | 382- | 452- | 465- | 488- | 527- | 545- | 581- | 704- | 448- |
| (Bce. 42) | 270 | 332 | 386 | 460 | 476 | 505 | 539 | 558 | 593 | 712 | 602 |
| AAVanc110 | 262- | 327- | 382- | 452- | 465- | 488- | 527- | 545- | 581- | 704- | 448- |
| | 270 | 332 | 386 | 460 | 476 | 505 | 539 | 558 | 593 | 712 | 602 |
| AAVanc80 | 262- | 326- | 381- | 451- | 465- | 488- | 527- | 545- | 581- | 704- | 447- |
| | 269 | 331 | 385 | 460 | 476 | 505 | 539 | 558 | 593 | 712 | 601 |
| BMN_0337 | 258- | 322- | 377- | 447- | 460- | 483- | 522- | 540- | 575- | 698- | 443- |
| (Bce. 35) | 265 | 327 | 381 | 455 | 471 | 500 | 534 | 552 | 587 | 706 | 595 |
| BMN_0338 | 258- | 322- | 377- | 447- | 460- | 483- | 522- | 540- | 575- | 698- | 443- |
| (Bce. 36) | 265 | 327 | 381 | 455 | 471 | 500 | 534 | 552 | 587 | 706 | 595 |
| BMN_0253 | 258- | 322- | 377- | 447- | 460- | 483- | 522- | 540- | 575- | 698- | 443- |
| (Bce. 43) | 265 | 327 | 381 | 455 | 471 | 500 | 534 | 552 | 587 | 706 | 595 |
| BMN_0254 | 258- | 322- | 377- | 447- | 460- | 483- | 522- | 540- | 575- | 698- | 443- |
| (Bce. 44) | 265 | 327 | 381 | 455 | 471 | 500 | 534 | 552 | 587 | 706 | 595 |
| BMN_0255 | 258- | 322- | 377- | 447- | 460- | 483- | 522- | 540- | 575- | 698- | 443- |
| (Bce. 45) | 265 | 327 | 381 | 455 | 471 | 500 | 534 | 552 | 587 | 706 | 595 |
| BMN_0256 | 258- | 322- | 377- | 447- | 460- | 483- | 522- | 540- | 575- | 698- | 443- |
| (Bce. 46) | 265 | 327 | 381 | 455 | 471 | 500 | 534 | 552 | 587 | 706 | 595 |
| BMN_0257 | 258- | 322- | 377- | 447- | 460- | 483- | 522- | 540- | 575- | 698- | 443- |
| (Bcy. 20) | 265 | 327 | 381 | 455 | 471 | 500 | 534 | 552 | 587 | 706 | 595 |
| BMN_0258 | 258- | 322- | 377- | 447- | 460- | 483- | 522- | 540- | 575- | 698- | 443- |
| (Bcy. 22) | 265 | 327 | 381 | 455 | 471 | 500 | 534 | 552 | 587 | 706 | 595 |
| BMN_0260 | 258- | 322- | 377- | 447- | 460- | 483- | 522- | 540- | 575- | 698- | 443- |
| (Bcy. 23) | 265 | 327 | 381 | 455 | 471 | 500 | 534 | 552 | 587 | 706 | 595 |
| BMN_0261 | 265- | 328- | 383- | 453- | 469- | 492- | 531- | 549- | 584- | 707- | 449- |
| (Bba. 26) | 271 | 333 | 387 | 464 | 480 | 508 | 543 | 561 | 596 | 715 | 604 |
| BMN_0262 | 265- | 328- | 383- | 453- | 469- | 492- | 531- | 549- | 584- | 707- | 449- |
| (Bba. 27) | 271 | 333 | 387 | 464 | 480 | 508 | 543 | 561 | 596 | 715 | 604 |
| BMN_0263 | 265- | 328- | 383- | 453- | 469- | 492- | 531- | 549- | 584- | 707- | 449- |
| (Bba. 29) | 271 | 333 | 387 | 464 | 480 | 508 | 543 | 561 | 596 | 715 | 604 |
| BMN_0264 | 265- | 328- | 383- | 453- | 469- | 492- | 531- | 549- | 584- | 707- | 449- |
| (Bba. 30) | 271 | 333 | 387 | 464 | 480 | 508 | 543 | 561 | 596 | 715 | 604 |
| BMN_0265 | 265- | 328- | 383- | 453- | 469- | 492- | 531- | 549- | 584- | 707- | 449- |
| (Bba. 34) | 271 | 333 | 387 | 464 | 480 | 508 | 543 | 561 | 596 | 715 | 604 |
| BMN_0266 | 265- | 328- | 383- | 453- | 469- | 492- | 531- | 549- | 584- | 707- | 449- |
| (Bba. 35) | 271 | 333 | 387 | 464 | 480 | 508 | 543 | 561 | 596 | 715 | 604 |
| BMN_0267 | 265- | 328- | 383- | 453- | 469- | 492- | 531- | 549- | 584- | 707- | 449- |
| (Bba. 36) | 271 | 333 | 387 | 464 | 480 | 508 | 543 | 561 | 596 | 715 | 604 |
| BMN_0268 | 265- | 328- | 383- | 453- | 469- | 492- | 531- | 549- | 584- | 707- | 449- |
| (Bba. 37) | 271 | 333 | 387 | 464 | 480 | 508 | 543 | 561 | 596 | 715 | 604 |
| BMN_0269 | 265- | 328- | 383- | 453- | 469- | 492- | 531- | 549- | 584- | 707- | 449- |
| (Bba. 38) | 271 | 333 | 387 | 464 | 480 | 508 | 543 | 561 | 596 | 715 | 604 |
| BMN_0270 | 265- | 328- | 383- | 453- | 469- | 492- | 531- | 549- | 584- | 707- | 449- |
| (Bba. 41) | 271 | 333 | 387 | 464 | 480 | 508 | 543 | 561 | 596 | 715 | 604 |
| BMN_0271 | 265- | 328- | 383- | 453- | 469- | 492- | 531- | 549- | 584- | 707- | 449- |
| (Bba. 42) | 271 | 333 | 387 | 464 | 480 | 508 | 543 | 561 | 596 | 715 | 604 |
| BMN_0272 | 265- | 328- | 383- | 453- | 469- | 492- | 531- | 549- | 584- | 707- | 449- |
| (Bba. 43) | 271 | 333 | 387 | 464 | 480 | 508 | 543 | 561 | 596 | 715 | 604 |
| BMN_0273 | 265- | 328- | 383- | 453- | 469- | 492- | 531- | 549- | 584- | 707- | 449- |
| (Bba. 44) | 271 | 333 | 387 | 464 | 480 | 508 | 543 | 561 | 596 | 715 | 604 |
| BMN_0306 | 262- | 327- | 382- | 452- | 465- | 488- | 527- | 545- | 581- | 704- | 448- |
| (Brh. 26) | 270 | 332 | 386 | 460 | 476 | 505 | 539 | 558 | 593 | 712 | 601 |
| BMN_0307 | 262- | 327- | 382- | 452- | 465- | 488- | 527- | 545- | 581- | 704- | 448- |
| (Brh. 27) | 270 | 332 | 386 | 460 | 476 | 505 | 539 | 558 | 593 | 712 | 601 |
| BMN_0308 | 262- | 327- | 382- | 452- | 465- | 488- | 527- | 545- | 581- | 704- | 448- |
| (Brh. 28) | 270 | 332 | 386 | 460 | 476 | 505 | 539 | 558 | 593 | 712 | 601 |
| BMN_0309 | 262- | 327- | 382- | 452- | 465- | 488- | 527- | 545- | 581- | 704- | 448- |
| (Brh. 29) | 270 | 332 | 386 | 460 | 476 | 505 | 539 | 558 | 593 | 712 | 601 |
| BMN_0310 | 262- | 327- | 382- | 452- | 465- | 488- | 527- | 545- | 581- | 704- | 448- |
| (Brh. 30) | 270 | 332 | 386 | 460 | 476 | 505 | 539 | 558 | 593 | 712 | 601 |
| BMN_0311 | 262- | 327- | 382- | 452- | 465- | 488- | 527- | 545- | 581- | 704- | 448- |
| (Brh. 31) | 270 | 332 | 386 | 460 | 476 | 505 | 539 | 558 | 593 | 712 | 601 |
| BMN_0312 | 262- | 327- | 382- | 452- | 465- | 488- | 527- | 545- | 581- | 704- | 448- |
| (Brh. 32) | 270 | 332 | 386 | 460 | 476 | 505 | 539 | 558 | 593 | 712 | 601 |
| BMN_0313 | 262- | 327- | 382- | 452- | 465- | 488- | 527- | 545- | 581- | 704- | 448- |
| (Brh. 33) | 270 | 332 | 386 | 460 | 476 | 505 | 539 | 558 | 593 | 712 | 601 |
| BMN_0208 | 262- | 327- | 382- | 452- | 466- | 489- | 528- | 546- | 582- | 705- | 448- |
| (Bfm. 17) | 270 | 332 | 386 | 461 | 477 | 506 | 540 | 559 | 594 | 713 | 602 |
| BMN_0209 | 262- | 327- | 382- | 452- | 466- | 489- | 528- | 546- | 582- | 705- | 448- |
| (Bfm. 18) | 270 | 332 | 386 | 461 | 477 | 506 | 540 | 559 | 594 | 713 | 602 |
| BMN_0210 | 262- | 327- | 382- | 452- | 466- | 489- | 528- | 546- | 582- | 705- | 448- |
| (Bfm. 20) | 270 | 332 | 386 | 461 | 477 | 506 | 540 | 559 | 594 | 713 | 602 |
| BMN_0211 | 262- | 327- | 382- | 452- | 466- | 489- | 528- | 546- | 582- | 705- | 448- |
| (Bfm. 21) | 270 | 332 | 386 | 461 | 477 | 506 | 540 | 559 | 594 | 713 | 602 |
| BMN_0212 | 262- | 327- | 382- | 452- | 466- | 489- | 528- | 546- | 582- | 705- | 448- |
| (Bfm. 24) | 270 | 332 | 386 | 461 | 477 | 506 | 540 | 559 | 594 | 713 | 602 |
| BMN_0213 | 262- | 327- | 382- | 452- | 466- | 489- | 528- | 546- | 582- | 705- | 448- |
| (Bfm. 25) | 270 | 332 | 386 | 461 | 477 | 506 | 540 | 559 | 594 | 713 | 602 |
| BMN_0214 | 262- | 327- | 382- | 452- | 466- | 489- | 528- | 546- | 582- | 705- | 448- |
| (Bfm. 27) | 270 | 332 | 386 | 461 | 477 | 506 | 540 | 559 | 594 | 713 | 602 |
| BMN_0215 | 262- | 327- | 382- | 452- | 466- | 489- | 528- | 546- | 582- | 705- | 448- |
| (Bfm. 32) | 270 | 332 | 386 | 461 | 477 | 506 | 540 | 559 | 594 | 713 | 602 |
| BMN_0216 | 262- | 327- | 382- | 452- | 466- | 489- | 528- | 546- | 582- | 705- | 448- |
| (Bfm. 33) | 270 | 332 | 386 | 461 | 477 | 506 | 540 | 559 | 594 | 713 | 602 |
| BMN_0217 | 262- | 327- | 382- | 452- | 466- | 489- | 528- | 546- | 582- | 705- | 448- |
| (Bfm. 34) | 270 | 332 | 386 | 461 | 477 | 506 | 540 | 559 | 594 | 713 | 602 |
| BMN_0218 | 262- | 327- | 382- | 452- | 466- | 489- | 528- | 546- | 582- | 705- | 448- |
| (Bfm. 35) | 270 | 332 | 386 | 461 | 477 | 506 | 540 | 559 | 594 | 713 | 602 |

### 6.5.11 Example 10: In Vivo Evaluation of Novel rAAV Viral Particles Tropism in the Ear

[0425] Studies were conducted to determine if the novel rAAV viral particles could be delivered and expressed in the ear.

[0426] Viral vector production: rAAV comprising the novel capsids and an eGFP transgene were produced as described herein. Virus aliquots were stored at −80° C. and thawed just prior to use for in vivo injections.

[0427] Mice: Wild type C57BL/6J (Jackson Laboratories) mice were used for this study. Mice with ages P1-P2 were used for in vivo delivery of viral vectors according to approved protocols.

### In Vivo Viral Inner Ear Injections:

[0428] In brief, P1-2 mice were anesthetized with hypothermia through 3 min of exposure to ice water. During the surgery (10-15 min), mice were kept on an ice pad. Using a stereo microscope (Stemi 2000, Zeiss, Oberkochen, Germany) for visualization, a small postauricular incision was made to expose the cochlea bulla and semicircular canals surrounding the utricle. After puncturing the temporal bone, a glass micropipette was inserted into the puncture to manually inject 1-1.2 uL (1−2×10¹⁴ gc/mL) of AAV at a constant rate. Following the procedure, mice were placed on a 37° C. heating pad until fully recovered, and standard postoperative care was applied. All animal procedures were approved by Animal Care and Use Committee and are in accordance with the NIH Guide for Care and Use of Laboratory Animals.

[0429] Euthanization of P10 mice were conducted via CO₂ inhalation. Temporal bones were harvested, punctured at the round and oval windows and helicotrema, and fixed in 4% paraformaldehyde for 1 h at room temperature. Tissues were then decalcified in 120 mM EDTA for 16-24 h. Cochleas were sectioned into apical, middle, and basal portions. The organ of Corti was isolated and prepared for whole-mount processing by removal of the lateral wall, spiral limbus, and tectorial membrane.

### Tissue Processing and Image Analysis:

[0430] Tissues were permeabilized for 1 h in 0.25% Triton X-100, blocked for 1 h in 2.5% normal donkey serum, and stained at 4 C overnight with rabbit anti-myosin 7a (hair cell marker) primary antibody (1:500 Proteus Biosciences, Ramona, CA, USA #25-6790). After washing with PBS, samples were incubated for 3-4 h with fluorophore-conjugated donkey anti-rabbit secondary antibody (1:400 Alexa Fluor 647: Thermo Fisher #A31573) and fluorophore-conjugated phalloidin (1:400 Alexa Fluor Plus 405: Thermo Fisher #A30104). Tissues were then mounted on a glass coverslip with Vectashield mounting medium (Vector Laboratories, Burlingame, CA, USA). Confocal imaging was performed using an LSM 800 (Carl Zeiss) microscope. Maximum intensity projection images were generated in ImageJ.

[0431] The eGFP-positive cells in the ear were evaluated manually and scored by intensity as follows: “-” means no expression, “*”=low, “**”=medium, “***”=high, and/or “****”=extremely high expression. Uninjected control samples were used to exclude autofluorescence. The results are shown below in Table 11.

TABLE 11
Intensity of eGFP-positive cells in the Ear

| | Cochlear | | | | | |
|---|---|---|---|---|---|---|
| AAV_ID | Apex | Mid | Base | Saccule | Utricle | Ampulla |
| BCD_0106 | * | * | — | *** | **** | **** |
| BCD_0361 | ** | *** | ** | **** | **** | *** |

[0432] The intensity observed in Table 11 is a proxy for AAV viral tropism (i.e., tissue/organ infectivity in the ear). The results indicate that BCD_0106 and BCD_0361 has high infectivity/tropism in the ear.

### 6.5.12 Example 11: In Vivo Evaluation of Novel rAAV Viral Particles Tropism in the Mouse Brain

[0433] In vivo studies were conducted in mice to evaluate if a selected rAAV and a novel rAAV particle comprising a BCD_0160 capsid protein could expressed in the brain of mice.

[0434] Mice: Adult wild type C57BL/6 mice (6-8 weeks old) were used for this study.

### Viral Vector Production:

[0435] rAAVs comprising BCD_0160 capsid protein or selected rAAV AAV-9-PHP.eb, comprising the vector CN1839-rAAV-hSyn1-SYFP2-10aa-H2B-WPRE3-BGHpA (Addgene plasmid #163509; http://n2t.net/addgene: 163509; RRID: Addgene_163509) were made as described in the examples above

### Retro-Orbital (RO) Injections:

[0436] RO injections were performed in C57BL/6 adult mice. Briefly, mice were anesthetized with 1-5% isoflurane in oxygen. A 31-gauge needle syringe loaded with rAAV was used to inject in the retro-orbital sinus (2.5e11 vg/mouse) in a volume that does not exceed 10% of the mouse blood volume. After, the mice were recovered from anesthesia and placed back in a clean cage. All animal procedures were approved by Animal Care and Use Committee and are in accordance with the NIH Guide for Care and Use of Laboratory Animals.

### Tissue Processing and Image Analysis:

[0437] Four weeks after injection, the mice underwent euthanization by deep anesthesia with sodium pentobarbital. After, transcardial perfusion with phosphate buffered saline (PBS) was conducted and the brain was removed and bisected along the midline. The brain was drop-fixed in 10% neutral buffered formalin (Fisher Scientific, Waltham, MA) overnight at 4° C., fixed in 10% formalin, embedded in paraffin wax, sectioned in a sagittal at 5 μm thickness and then mounted on glass slides. The tissue sections were deparaffinized in xylene and rehydrated in a graded series of alcohols. Antigen retrieval was performed by steaming in distilled water for 30 min, and endogenous peroxidase activity was blocked by incubation in 0.03% hydrogen peroxide. Sections were then immunostained and mounted with Vectashield (Vector laboratories). Images were taken with a 40× Plan-Apochromat objective using a Zeiss AxioObserver equipped with an ApoTome Imaging System (Zeiss).

[0438] FIG. 15 shows a representative image of in vivo BCD_0160 expression in the brain. Bright spots in FIG. 15 show the expression of BCD_0160 vector-mediated fluorescent protein expression in the nuclei of neurons in a sagittal section of C57BL/6 adult mice. Zoomed-in images of areas within the Cortex and Brainstem of FIG. 15 of the sagittal section are shown. White arrows point to the colocalization of the BCD_0160 vector-mediated expression with a nuclear stain.

[0439] The embodiments described herein are intended to be merely exemplary, and those skilled in the art will recognize, or will be able to ascertain using no more than routine experimentation, numerous equivalents of specific compounds, materials, and procedures. All such equivalents are considered to be within the scope of the disclosure. The full scope of the disclosure is better understood with reference to the appended claims.

### 6.6 Sequences

Lengthy table referenced here
US20240376496A1-20241114-T00001
Please refer to the end of the specification for access instructions.

### 7. EMBODIMENTS

[0441] 1. A member of an adeno-associated virus (AAV) clade, comprising: (a) a VP1 amino acid sequence that has at least 90% identity to the VP1 amino acid sequence of any one of SEQ ID NOs: 12-127 and 361-362, (b) a VP2 amino acid sequence that has at least 90% identity to the VP2 amino acid sequence of any one of SEQ ID NOs: 12-127 and 361-362, or (c) a VP3 amino acid sequence that has at least 90% identity to the VP3 amino acid sequence of any one of SEQ ID NOs: 12-127 and 361-362.
[0442] 2. The AAV clade member of embodiment 1, wherein (a) the VP1 amino acid sequence has at least 95% identity to the VP1 amino acid sequence of any one of SEQ ID NOs: 12-127 and 361-362, (b) the VP2 amino acid sequence has at least 95% identity to the VP2 amino acid sequence of any one of SEQ ID NOs: 12-127 and 361-362, or (c) the VP3 amino acid sequence has at least 95% identity to the VP3 amino acid sequence of any one of SEQ ID NOs: 12-127 and 361-362.
[0443] 3. The AAV clade member of embodiment 1, wherein the VP1 amino acid sequence has at least 98% identity to the VP1 amino acid sequence of any one of SEQ ID NOs: 12-127 and 361-362.
[0444] 4. The AAV clade member of embodiment 1, 2, or 3, wherein the VP1, VP2, or VP3 amino acid sequence comprises a variable region sequence, wherein the variable region sequence is selected from the variable region of at least one of SEQ ID NOs: 12-127 and 361-362.
[0445] 5. The AAV clade member any one of embodiments 1 to 4, wherein the VP1 amino acid sequence further comprises a GBS region sequence, wherein the GBS region sequence is selected from the GBS region sequence of at least one of: SEQ ID NOs: 12-127 and 361-362.
[0446] 6. The AAV clade member any one of embodiments 1 to 5, wherein the VP1 amino acid sequence further comprises a GH loop sequence, wherein the GH loop sequence is selected from the GH loop of at least one of: SEQ ID NOs: 12-127 and 361-362.
[0447] 7. The AAV clade member any one of embodiments 1 to 6, wherein the VP2 amino acid sequence is the VP2 amino acid sequence of any one of SEQ ID NOs: 12-127 and 361-362. 8. The AAV clade member any one of embodiments 1 to 6, wherein the VP3 amino acid sequence is the VP3 amino acid sequence of any one of SEQ ID NOs: 12-127 and 361-362.
[0448] 9. The AAV clade member any one of embodiments 1 to 6, wherein the VP1 amino acid sequence is the VP1 amino acid sequence of any one of SEQ ID NOs: 12-127 and 361-362.
[0449] 10. The AAV clade member of any one of embodiments 1 to 8, wherein the VP1, VP2, or VP3 amino acid sequence comprises one or more of the amino acid modifications listed in Table 2.
[0450] 11. The AAV clade member of embodiment 10, wherein the one or more of the amino acid modifications of the VP1, VP2, or VP3 amino acid sequence are limited to the ones listed in Table 2.
[0451] 12. A member of an adeno-associated virus (AAV) clade, comprising: a VP1 amino acid sequence that has a least 90% sequence identity to a representative VP1 amino acid sequence of a AAV clade, and wherein the representative sequence is selected from any one of: SEQ ID NOs: 28, 10, 91, 7, 9, 4, 27, 3, 1, and 23.
[0452] 13. The AAV clade member of embodiment 12, wherein the VP1 amino acid sequence has at least 95% identity to any one of: SEQ ID NOs: 28, 10, 91, 7, 9, 4, 27, 3, 1, and 23.
[0453] 14. The AAV clade member of embodiment 12, wherein the VP1 amino acid sequence has at least 98% identity to any one of: SEQ ID NOs: 28, 10, 91, 7, 9, 4, 27, 3, 1, and 23.
[0454] 15. The AAV clade member of embodiment 12, wherein the VP1 amino acid sequence has at least 99% identity to any one of: SEQ ID NOs: 28, 10, 91, 7, 9, 4, 27, 3, 1, and 23.
[0455] 16. The AAV clade member of any one of embodiments 12 to 15, wherein the VP1 amino acid sequence comprises one or more of the amino acid modifications listed in Table 2.
[0456] 17. The AAV clade member of embodiment 16, wherein the VP1 amino acid sequence modifications are limited to the ones listed in Table 2.
[0457] 18. A member of an adeno-associated virus (AAV) clade, comprising: a VP1 amino acid sequence that has a variable region amino acid sequence, wherein the variable region amino acid sequence has substantial sequence similarity or identity to a variable region amino acid sequence in any one of: SEQ ID NOs: 12-127 and 361-362.
[0458] 19. The AAV clade member of embodiment 18, wherein the variable region amino acid sequence is selected from any one of VRI-VRIX, a GBS region, or a GH loop, or a combination thereof.
[0459] 20. The AAV clade member of embodiment 18, wherein the any one of VRI-VRIX sequence has at least 90% sequence similarity or identity to any one of VRI-VRIX of any one of SEQ ID NOs: 12-127 and 361-362.
[0460] 21. The AAV clade member of embodiment 18, wherein the GBS region sequence has at least 90% sequence similarity or identity to the GBS region of any one of SEQ ID NOs: 12-127 and 361-362.
[0461] 22. The AAV clade member of embodiment 18, wherein the GH loop sequence has at least 90% sequence similarity or identity to the GH loop of any one of SEQ ID NOs: 12-127 and 361-362.
[0462] 23. A member of an adeno-associated virus (AAV) clade, comprising: a first VP1 amino acid sequence that is phylogenetically related to a second VP1 amino acid sequence as determined by Neighbor-joining method, wherein the first VP1 amino acid sequence has a genetic distance to the second VP1 amino acid sequence as provided in Table 3.
[0463] 24. The AAV clade member of embodiment 23, wherein the genetic distance is the mean genetic distance within the same AAV clade, as provided in Table 3.
[0464] 25. The AAV clade member of embodiment 23, wherein the genetic distance is a range from about the min genetic distance within the same clade to about the max genetic distance within the same clade, as provided in Table 3.
[0465] 26. The AAV clade member of any one of embodiments 23 to 25, wherein the second VP1 amino acid sequence comprises a VP1 amino acid sequence of any one of: SEQ ID NOs: 1-180 and 361-362.
[0466] 27. A member of an adeno-associated virus (AAV) branch, comprising: a first VP1 amino acid sequence that is phylogenetically related to a second VP1 amino acid sequence as determined by Neighbor-joining method, wherein the first VP1 amino acid sequence has a genetic distance to the second VP1 amino acid sequence as provided in Table 3.
[0467] 28. The AAV branch member of embodiment 27, wherein the genetic distance is the mean genetic distance within the same branch as provided in Table 3.
[0468] 29. The AAV branch member of embodiment 27, wherein the genetic distance is a range from about the min genetic distance within the same branch to about the max genetic distance within the same branch as provided in Table 3.
[0469] 30. The AAV branch member of embodiment 27, wherein the second VP1 amino acid sequence comprises a VP1 amino acid sequence of any one of SEQ ID NOs: 1-180 and 361-362.
[0470] 31. The AAV clade or AAV branch member of any of the preceding embodiments, further comprising the ability to evade AAV humoral immunity as determined by an in vitro assay.
[0471] 32. The AAV clade or AAV branch member of embodiment 31, wherein the in vitro assay is an IVIg assay that determines a percent (%) transduction, and wherein the % transduction is about 2% to about 500% greater transduction as compared to a reference AAV at a given IVIg concentration.
[0472] 33. The AAV clade or AAV branch member of embodiment 31, wherein the in vitro assay is an IVIg assay that determines a neutralizing antibody (Nab) titer, and wherein the NAb titer is reduced to about 1-fold to about 4,000-fold as compared to a reference AAV.
[0473] 34. The AAV clade or AAV branch member of embodiment 31, wherein the in vitro assay is an IVIg assay that determines a NC₅₀, and wherein the NC₅₀ increases from about 1-fold to about 600-fold as compared to a reference AAV.
[0474] 35. An AAV capsid protein, comprising: (a) a VP1 amino acid sequence that has at least 90% identity to the VP1 amino acid sequence of any one of SEQ ID NOs: 12-127 and 361-362, (b) a VP2 amino acid sequence that has at least 90% identity to the VP2 amino acid sequence of the VP2 sequence of any one of SEQ ID NOs: 12-127 and 361-362, or (c) a VP3 amino acid sequence that has at least 90% identity to the VP3 amino acid sequence of any one of SEQ ID NOs: 12-127 and 361-362.
[0475] 36. The AAV capsid protein of embodiment 35, wherein (a) the VP1 amino acid sequence has at least 95% identity to the VP1 amino acid sequence of any one of SEQ ID NOs: 12-127 and 361-362, (b) the VP2 amino acid sequence has at least 95% identity to the VP2 amino acid sequence of ay one of SEQ ID NOs: 12-127 and 361-362, or (c) the VP3 amino acid sequence has at least 95% identity to the VP3 amino acid sequence of any one of SEQ ID NOs: 12-127 and 361-362.
[0476] 37. The AAV capsid protein of embodiment 35, wherein (a) the VP1 amino acid sequence has at least 98% identity to the VP1 amino acid sequence of any one of SEQ ID NOs: 12-127 and 361-362, (b) the VP2 amino acid sequence has at least 98% identity to the VP2 amino acid sequence of any one of SEQ ID NOs: 12-127 and 361-362, or (c) the VP3 amino acid sequence has at least 98% identity to the VP3 amino acid sequence of any one of SEQ ID NOs: 12-127 and 361-362.
[0477] 38. The AAV capsid protein of embodiment 35, wherein the VP1, VP2, or VP3 amino acid sequence is a VP1, VP2 or VP3 amino acid sequence of any one of SEQ ID NOs: 12-127 and 361-362.
[0478] 39. The AAV capsid protein of any one of embodiments 35 to 38, wherein the VP1, VP2, or VP3 amino acid sequence comprises a variable region amino acid sequence, and wherein the variable region amino acid sequence is a VRI-VRIX of any one of: SEQ ID NOs: 12-127 and 361-362.
[0479] 40. The AAV capsid protein of any one of embodiments 35 to 39, wherein the VP1, VP2, or VP3 amino acid sequence comprises a GBS region amino acid sequence, and wherein the GBS region amino acid sequence is a GBS region of any one of: SEQ ID NOs: 12-127 and 361-362.
[0480] 41. The AAV capsid protein of any one of embodiments 35 to 40, wherein the VP1, VP2, or VP3 amino acid sequence comprises a GH loop amino acid sequence, and wherein the GH loop amino acid sequence is a GH loop selected from any one of: SEQ ID NOs: 12-127 and 361-362.
[0481] 42. The AAV capsid protein of any one of embodiments 35 to 41, further comprising the ability to evade AAV humoral immunity as determined by an in vitro assay.
[0482] 43. The AAV capsid protein of any one of embodiments 35 to 42, wherein the in vitro assay is an IVIg assay that determines a percent (%) transduction, and wherein the % transduction is about 2% to about 500% greater transduction as compared to a reference AAV at a given IVIg concentration.
[0483] 44. The AAV capsid protein of any one of embodiments 35 to 42, wherein the in vitro assay is an IVIg assay that determines a NC₅₀, and wherein the NAb titer is reduced to about 1-fold to about 4,000-fold as compared to a reference AAV.
[0484] 45. The AAV capsid protein of any one of embodiments 35 to 42, wherein the in vitro assay is an IVIg assay that determines a NC₅₀, and wherein the NC₅₀ increases from about 1-fold to about 600-fold as compared to a reference AAV.
[0485] 46. A vector, comprising: (a) a nucleotide sequence encoding a VP1, VP2, or VP3 capsid protein that has at least 90% identity to the VP1, VP2, or VP3 of any one of SEQ ID NOs: 12-127 and 361-362; and (b) a heterologous regulatory sequence that controls expression of the capsid protein in a host cell.
[0486] 47. The vector of embodiment 46, wherein the nucleotide sequence encoding a VP1, VP2, or VP3 capsid protein has at least 95% identity to the VP1, VP2, or VP3 of any one of SEQ ID NOs: 12-127 and 361-362.
[0487] 48. The vector of embodiment 46, wherein the nucleotide sequence encoding a VP1, VP2, or VP3 capsid protein has at least 98% identity to the VP1, VP2, or VP3 of any one of SEQ ID NOs: 12-127 and 361-362.
[0488] 49. A vector, comprising: (a) a nucleotide sequence encoding a VP1 amino acid sequence of the AAV clade member of any one of embodiments 1-26 or 31-34; and (b) a heterologous regulatory sequence that controls expression of the capsid protein in a host cell.
[0489] 50. A vector, comprising: (a) a nucleotide sequence encoding a VP1 amino acid sequence of the AAV branch member of any one of embodiments 27-34; and (b) a heterologous regulatory sequence that controls expression of the capsid protein in a host cell.
[0490] 51. The vector of any one of embodiments 46 to 50, wherein the vector further comprises a transgene comprising a nucleotide sequence encoding a biomolecule operably linked to a heterologous regulatory sequence that controls expression of the capsid protein in a host cell. 52. An in vitro host cell, comprising the nucleotide sequence encoding a VP1, VP2, or VP3 capsid protein of any one of embodiments 35 to 45.
[0491] 53. A novel recombinant AAV viral particle, comprising: (a) a capsid, wherein the capsid comprises a VP1 amino acid sequence of a AAV clade member of any one of embodiments 1 to 26 or 31 to 34; and (b) an rAAV vector genome comprising a nucleotide sequence encoding a biomolecule operably linked to a heterologous regulatory sequence that controls expression of the nucleotide sequence in a host cell.
[0492] 54. A novel recombinant AAV viral particle, comprising: (a) a capsid, wherein the capsid comprises a VP1 amino acid sequence of a AAV branch member of any one of embodiments 27 to 34; and (b) an rAAV vector genome comprising a nucleotide sequence encoding a biomolecule operably linked to a heterologous regulatory sequence that controls expression of the nucleotide sequence in a host cell.
[0493] 55. A novel recombinant AAV viral particle, comprising: (a) the AAV capsid protein of any one of embodiments 35 to 45; and (b) an rAAV vector genome comprising a nucleotide sequence encoding a biomolecule operably linked to a heterologous regulatory sequence that controls expression of the nucleotide sequence in a host cell.
[0494] 56. The novel recombinant AAV viral particle of any one of embodiments 53 to 55, wherein the rAAV vector genome comprises an AAV inverted terminal repeat or a fragment thereof.
[0495] 57. The novel recombinant AAV viral particle of embodiment 56, wherein the AAV inverted terminal repeat is a 5′ AAV inverted terminal repeat selected from Table 4.
[0496] 58. The novel recombinant AAV viral particle of embodiment 56, wherein the AAV inverted terminal repeat is a 3′ AAV inverted terminal repeat selected from Table 4.
[0497] 59. The recombinant AAV viral particle of any one of embodiments 53 to 55, wherein the rAAV vector genome comprises a 5′ AAV inverted terminal repeat and a 3′ AAV inverted terminal repeat.
[0498] 60. The recombinant AAV viral particle of embodiment 59, wherein the 5′ AAV inverted terminal repeat and 3′ AAV inverted terminal repeat are selected from Table 4.
[0499] 61. The novel recombinant AAV viral particle of any one of embodiments 53 to 60, wherein the biomolecule is selected from a therapeutic protein, an enzyme, a peptide, an RNA, a component of CRISPR gene editing system, an antisense oligonucleotides (AONs), an AON-mediated exon skipping, a poison exon, or a dominant negative mutant protein.
[0500] 62. The novel recombinant AAV viral particle of embodiment 61, wherein the therapeutic protein is endogenously expressed in one or more of a muscle, heart, brain, plasma, kidney, liver or cancer cell of a subject.
[0501] 63. The novel recombinant AAV viral particle of embodiment 62, wherein therapeutic protein is a functional version of the endogenously expressed protein.
[0502] 64. The novel recombinant AAV viral particle of any one of embodiments 53 to 63, wherein the recombinant AAV viral particle has enhanced tropism to the muscle cell as compared to a reference AAV.
[0503] 65. The novel recombinant AAV viral particle of any one of embodiments 53 to 63, wherein the recombinant AAV viral particle has enhanced tropism to the heart cell as compared to a reference AAV.
[0504] 66. The novel recombinant AAV viral particle of any one of embodiments 53 to 63, wherein the recombinant AAV viral particle has enhanced tropism to the brain cell as compared to a reference AAV.
[0505] 67. The novel recombinant AAV viral particle of any one of embodiments 53 to 63, wherein the recombinant AAV viral particle has enhanced tropism to the plasma cell as compared to a reference AAV.
[0506] 68. The novel recombinant AAV viral particle of any one of embodiments 53 to 63, wherein the recombinant AAV viral particle has enhanced tropism to the kidney cell as compared to a reference AAV.
[0507] 69. The novel recombinant AAV viral particle of any one of embodiments 53 to 63, wherein the recombinant AAV viral particle has enhanced tropism to the liver cell as compared to a reference AAV.
[0508] 70 The novel recombinant AAV viral particle of any one of embodiments 53 to 69, wherein the novel recombinant AAV viral particle de-targets cells in a subject other than the cell for which the novel rAAV has enhanced tropism.
[0509] 71. The novel recombinant AAV viral particle of embodiment 70, wherein the de-targeted cell is selected from one or more of a muscle, heart, brain, plasma, kidney, or liver cell.
[0510] 72. The novel recombinant AAV viral particle of any one of embodiments 53 to 71, wherein the recombinant AAV viral particle has the ability to evade AAV humoral immunity as determined by an in vitro assay.
[0511] 73. The novel recombinant AAV viral particle of embodiment 72, wherein the in vitro assay is an IVIg assay that determines a percent (%) transduction, and wherein the % transduction is about 2% to about 500% greater transduction as compared to a reference AAV at a given IVIg concentration.
[0512] 74. The novel recombinant AAV viral particle of embodiment 72, wherein the in vitro assay is an IVIg assay that determines a NC₅₀, and wherein the NAb titer is reduced to about 1-fold to about 4,000-fold as compared to a reference AAV.
[0513] 75. The novel recombinant AAV viral particle of embodiment 72, wherein the in vitro assay is an IVIg assay that determines a NC₅₀, and wherein the NC₅₀ increases from about 1-fold to about 600-fold as compared to a reference AAV.
[0514] 76. An in vitro cell or tissue comprising: the novel recombinant AAV viral particle of any one of embodiments 53 to 75.
[0515] 77. An ex vivo cell or tissue comprising: the novel recombinant AAV viral particle of any one of embodiments 53 to 75.
[0516] 78. A cultured host cell, comprising: a recombinant nucleic acid molecule encoding an AAV VP1 capsid protein comprising a sequence comprising the full length VP1 capsid protein of any one of SEQ ID NOs: 12-127 and 361-362; or a nucleotide sequence with at least 95% identical to the full length VP1 protein of any one of SEQ ID NOs: 12-127 and 361-362, wherein the recombinant nucleic acid molecule further comprises a heterologous sequence.
[0517] 79. A cultured host cell, comprising: a recombinant nucleic acid molecule encoding an AAV VP2 capsid protein comprising a sequence comprising: (a) the full length VP2 capsid protein of any one of SEQ ID NOs: 12-127 and 361-362; or (b) an amino acid sequence with at least 95% identity to the full length VP2 protein of any one of SEQ ID NOs: 12-127 and 361-362, wherein the recombinant nucleic acid molecule further comprises a heterologous sequence.
[0518] 80. A cultured host cell, comprising: a recombinant nucleic acid molecule encoding an AAV VP3 capsid protein comprising a sequence comprising: (a) the full length VP3 capsid protein of any one of SEQ ID NOs: 12-127 and 361-362; or (b) an amino acid sequence with at least 95% identical to the full length VP3 protein of any one of SEQ ID NOs: 12-127 and 361-362, wherein the recombinant nucleic acid molecule further comprises a heterologous sequence.
[0519] 81. The cultured host cell of any one of embodiments 78 to 80, wherein the amino acid residues varied in the AAV VP1, VP2, or VP3 capsid protein with at least 95% identity to the full length VP1, VP2, or VP3 capsid protein of any one of SEQ ID NOs: 12-127 and 361-362 are selected from Table 2.
[0520] 82. A cultured host cell containing a recombinant nucleic acid molecule, comprising: (a) nucleotides of a full length AAV VP1 capsid protein of any one of SEQ ID NOs: 192-307 and 363-364; or (b) a nucleotide sequence at least 95% identical to the nucleotide sequence of the full length VP1 capsid protein of any one of SEQ ID NOs: 192-307 and 363-364, wherein the recombinant nucleic acid molecule further comprises a heterologous sequence.
[0521] 83. A cultured host cell containing a recombinant nucleic acid molecule, comprising: (a) nucleotides of a full length AAV VP2 capsid protein of any one of SEQ ID NOs: 192-307 and 363-364; or (b) a nucleotide sequence at least 95% identical to the nucleotide sequence of the full length VP2 capsid protein of any one of SEQ ID NOs: 192-307 and 363-364, wherein the recombinant nucleic acid molecule further comprises a heterologous sequence.
[0522] 84. A cultured host cell containing a recombinant nucleic acid molecule, comprising: (a) nucleotides of a full length AAV VP3 capsid protein of any one of SEQ ID NOs: 192-307 and 363-364; or (b) a nucleotide sequence at least 95% identical to the nucleotide sequence of the full length VP3 capsid protein of any one of SEQ ID NOs: 192-307 and 363-364, wherein the recombinant nucleic acid molecule further comprises a heterologous sequence.
[0523] 85. The cultured host cell of any one of embodiments 78 to 81, wherein nucleotides varied in the nucleotide sequence encoding the AAV VP1, VP2, or VP3 with at least 95% identity to the full length VP1, VP2, or VP3 capsid protein of any one of SEQ ID NOs: 12-127 and 361-362 are selected from nucleic acids encoding the amino acid residues that vary in Table 2.
[0524] 86. A composition, comprising: a) the novel recombinant AAV viral particle of any one of embodiments 53 to 75; and (b) a physiologically acceptable carrier.
[0525] 87. A method of delivering a biomolecule to a cell in vitro, comprising: transducing the cell with the novel recombinant AAV viral particle of any one of embodiments 53 to 75.
[0526] 88. A method of delivering a biomolecule to a cell ex vivo, comprising: transducing the cell with the novel recombinant AAV viral particle of any one of embodiments 53 to 73.
[0527] 89. A method of delivering a biomolecule to a cell in a subject, comprising: administering the novel recombinant AAV viral particle of any one of embodiments 53 to 75 to the cell in the subject.
[0528] 90. The method of any one of embodiments 87 to 89, wherein the cell is one or more of a muscle, heart, brain, plasma, kidney, liver, or cancer cell.
[0529] 91. A method of treating a disease or disorder, comprising: administering the novel recombinant AAV viral particle of any one of embodiments 53 to 75 to a subject.
[0530] 92. The method of embodiments 89 or 91, wherein the subject is a human.
[0531] 93. A method for producing a novel recombinant AAV viral particle, comprising: culturing a host cell comprising one or more vectors or rAAV vector genomes for generating the novel rAAV viral particle, wherein the one or more vectors or rAAV vector genomes comprises a nucleotide sequence encoding the capsid protein of any one of embodiments 35 to 45.
[0532] 94. A method for producing a novel recombinant AAV viral particle, comprising: culturing a host cell comprising one or more vectors or rAAV vector genomes for generating the novel rAAV viral particle, wherein the one or more vectors or rAAV vector genomes comprises a nucleotide sequence encoding a VP1 protein of the AAV clade member of any one of embodiments 1 to 26 or 31 to 34.
[0533] 95. A method for producing a novel rAAV viral particle, comprising: culturing a host cell comprising one or more vectors or rAAV vector genomes for generating the novel rAAV viral particle, wherein the one or more vectors or rAAV vector genomes comprises a nucleotide sequence encoding a VP1 protein of the AAV branch member of any one of embodiments 27 to 34.
[0534] 96. The method of any one of embodiments 93 to 95, wherein the nucleotide sequence encoding the capsid protein or VP1 protein is operably linked to a heterologous regulatory sequence that controls expression of the nucleotide sequence in a host cell.
[0535] 97. The method of any one of embodiments 93 to 95, wherein the one or more vectors or rAAV vector genomes further comprises a nucleotide sequence used by the host cell to generate an rAAV viral particle, and wherein the nucleotide sequence is operably linked to a heterologous regulatory sequence that controls expression of the nucleotide sequence in a host cell.
[0536] 98. The method of any one of embodiments 93 to 97, wherein prior to the culturing step the host cell is transfected with the one or more vectors or rAAV genomes.
[0537] 99. The method of any one of embodiments 93 to 98, wherein the novel rAAV viral particle is isolated from the host cell.

LENGTHY TABLES
The patent application contains a lengthy table section. A copy of the table is available in electronic form from the USPTO web site (https://seqdata.uspto.gov/?pageRequest=docDetail&DocID=US20240376496A1). An electronic copy of the table will also be available from the USPTO upon request and payment of the fee set forth in 37 CFR 1.19(b)(3).

The application's sequence listing, which the Patent Office published only in electronic form, follows.

SEQUENCE LISTING (364 sequences)

SEQ ID NO: 1 - protein, 736 aa, Adeno-Associated Virus
  source 1..736: note = AAV-LK03
MAADGYLPDWLEDNLSEGIREWWALQPGAPKPKANQQHQDNARGLVLPGYKYLGPGNGLDKGEPVNAADAAALEHDKAYDQQLKAGDNPYLKYNHADAEFQERLKEDTSFGGNLGRAVFQAKKRLLEPLGLVEEAAKTAPGKKRPVDQSPQEPDSSSGVGKSGKQPARKRLNFGQTGDSESVPDPQPLGEPPAAPTSLGSNTMASGGGAPMADNNEGADGVGNSSGNWHCDSQWLGDRVITTSTRTWALPTYNNHLYKQISSQSGASNDNHYFGYSTPWGYFDFNRFHCHFSPRDWQRLINNNWGFRPKKLSFKLFNIQVKEVTQNDGTTTIANNLTSTVQVFTDSEYQLPYVLGSAHQGCLPPFPADVFMVPQYGYLTLNNGSQAVGRSSFYCLEYFPSQMLRTGNNFQFSYTFEDVPFHSSYAHSQSLDRLMNPLIDQYLYYLNRTQGTTSGTTNQSRLLFSQAGPQSMSLQARNWLPGPCYRQQRLSKTANDNNNSNFPWTAASKYHLNGRDSLVNPGPAMASHKDDEEKFFPMHGNLIFGKEGTTASNAELDNVMITDEEEIRTTNPVATEQYGTVANNLQSSNTAPTTRTVNDQGALPGMVWQDRDVYLQGPIWAKIPHTDGHFHPSPLMGGFGLKHPPPQIMIKNTPVPANPPTTFSPAKFASFITQYSTGQVSVEIEWELQKENSKRWNPEIQYTSNYNKSVNVDFTVDTNGVYSEPRPIGTRYLTRPL

SEQ ID NO: 2 - protein, 726 aa, Adeno-Associated Virus
  source 1..726: note = AAV-po.6
MSFVDHPPDWLEEVGEGLHEFLELEAGPPKPKPNQQKQDNARGLVLPGYNYLGPFNGLDKGEPVNRADAVAREHDISYNEQLQAGDNPYLKYNHADAEFQEKLKDDTSFGGNLGKAIFQAKKRVLEPFGLVEAPVKTAPAKKRPIEKSPAEPSSSKGIGKAGQQPARKRLNFGQTGDTDSAADPQPLGEPPAAPSGLGTGTMASGSGAPMADNNEGADGVGNASGNWHCDSTWLGDRVITTSTRTWALPTYNNHLYKQISSQSGANNDNHYFGYSTPWGYFDFNRFHCHFSPRDWQRLINNNWGFRPKRLNFKLFNIQVKEVTQTDGTKTIANNLTSTVQVFADSEYQLPYVLGSAHQGCFPPFPADVFMVPQYGYLTLNNGSQAMGRSSFYCLEYFPSQMLRTGNNFTFSYTFEDVPFHSSYAHSQSLDRLMNPLIDQYLYYLSKTQNGLGFSQAGHNSMRDQSRNWLPGPCFRQQRISKTPTQNNTGDFAWTGTTRYHLNGRNSAMNPGPAMASHKDDEERFFPQNGVLIFGKEDAEKNNAVLDKVIITDEEEIRTTNPVATGEYGLVATNFQNNTTAADTEMVNAQGILPGMVWQDRDVYLQGPIWAKIPHTDGHFHPSPLMGGFGLKRPPPQILIKNTPVPADPATTFNPAKLASFITQYSTGQVSVEIEWELQKENSKRWNPEVQYTSNYNKSVNVEFTVDNNGVYSEPRTIGTRYLTRNL

SEQ ID NO: 3 - protein, 736 aa, Adeno-Associated Virus
  source 1..736: note = AAV-1
MAADGYLPDWLEDNLSEGIREWWDLKPGAPKPKANQQKQDDGRGLVLPGYKYLGPFNGLDKGEPVNAADAAALEHDKAYDQQLKAGDNPYLRYNHADAEFQERLQEDTSFGGNLGRAVFQAKKRVLEPLGLVEEGAKTAPGKKRPVEQSPQEPDSSSGIGKTGQQPAKKRLNFGQTGDSESVPDPQPLGEPPATPAAVGPTTMASGGGAPMADNNEGADGVGNASGNWHCDSTWLGDRVITTSTRTWALPTYNNHLYKQISSASTGASNDNHYFGYSTPWGYFDFNRFHCHFSPRDWQRLINNNWGFRPKRLNFKLFNIQVKEVTTNDGVTTIANNLTSTVQVFSDSEYQLPYVLGSAHQGCLPPFPADVFMIPQYGYLTLNNGSQAVGRSSFYCLEYFPSQMLRTGNNFTFSYTFEEVPFHSSYAHSQSLDRLMNPLIDQYLYYLNRTQNQSGSAQNKDLLFSRGSPAGMSVQPKNWLPGPCYRQQRVSKTKTDNNNSNFTWTGASKYNLNGRESIINPGTAMASHKDDEDKFFPMSGVMIFGKESAGASNTALDNVMITDEEEIKATNPVATERFGTVAVNFQSSSTDPATGDVHAMGALPGMVWQDRDVYLQGPIWAKIPHTDGHFHPSPLMGGFGLKNPPPQILIKNTPVPANPPAEFSATKFASFITQYSTGQVSVEIEWELQKENSKRWNPEVQYTSNYAKSANVDFTVDNNGLYTEPRPIGTRYLTRPL

SEQ ID NO: 4 - protein, 735 aa, Adeno-Associated Virus [sequence omitted]

SEQ ID NO: 5 - protein, 736 aa, Adeno-Associated Virus
  source 1..736: note = AAV-3b
MAADGYLPDWLEDNLSEGIREWWALKPGVPQPKANQQHQDNRRGLVLPGYKYLGPGNGLDKGEPVNEADAAALEHDKAYDQQLKAGDNPYLKYNHADAEFQERLQEDTSFGGNLGRAVFQAKKRILEPLGLVEEAAKTAPGKKRPVDQSPQEPDSSSGVGKSGKQPARKRLNFGQTGDSESVPDPQPLGEPPAAPTSLGSNTMASGGGAPMADNNEGADGVGNSSGNWHCDSQWLGDRVITTSTRTWALPTYNNHLYKQISSQSGASNDNHYFGYSTPWGYFDFNRFHCHFSPRDWQRLINNNWGFRPKKLSFKLFNIQVKEVTQNDGTTTIANNLTSTVQVFTDSEYQLPYVLGSAHQGCLPPFPADVFMVPQYGYLTLNNGSQAVGRSSFYCLEYFPSQMLRTGNNFQFSYTFEDVPFHSSYAHSQSLDRLMNPLIDQYLYYLNRTQGTTSGTTNQSRLLFSQAGPQSMSLQARNWLPGPCYRQQRLSKTANDNNNSNFPWTAASKYHLNGRDSLVNPGPAMASHKDDEEKFFPMHGNLIFGKEGTTASNAELDNVMITDEEEIRTTNPVATEQYGTVANNLQSSNTAPTTRTVNDQGALPGMVWQDRDVYLQGPIWAKIPHTDGHFHPSPLMGGFGLKHPPPQIMIKNTPVPANPPTTFSPAKFASFITQYSTGQVSVEIEWELQKENSKRWNPEIQYTSNYNKSVNVDFTVDTNGVYSEPRPIGTRYLTRNL

SEQ ID NO: 6 - protein, 736 aa, Adeno-Associated Virus
  source 1..736: note = AAV-6
MAADGYLPDWLEDNLSEGIREWWDLKPGAPKPKANQQKQDDGRGLVLPGYKYLGPFNGLDKGEPVNAADAAALEHDKAYDQQLKAGDNPYLRYNHADAEFQERLQEDTSFGGNLGRAVFQAKKRVLEPFGLVEEGAKTAPGKKRPVEQSPQEPDSSSGIGKTGQQPAKKRLNFGQTGDSESVPDPQPLGEPPATPAAVGPTTMASGGGAPMADNNEGADGVGNASGNWHCDSTWLGDRVITTSTRTWALPTYNNHLYKQISSASTGASNDNHYFGYSTPWGYFDFNRFHCHFSPRDWQRLINNNWGFRPKRLNFKLFNIQVKEVTTNDGVTTIANNLTSTVQVFSDSEYQLPYVLGSAHQGCLPPFPADVFMIPQYGYLTLNNGSQAVGRSSFYCLEYFPSQMLRTGNNFTFSYTFEDVPFHSSYAHSQSLDRLMNPLIDQYLYYLNRTQNQSGSAQNKDLLFSRGSPAGMSVQPKNWLPGPCYRQQRVSKTKTDNNNSNFTWTGASKYNLNGRESIINPGTAMASHKDDKDKFFPMSGVMIFGKESAGASNTALDNVMITDEEEIKATNPVATERFGTVAVNLQSSSTDPATGDVHVMGALPGMVWQDRDVYLQGPIWAKIPHTDGHFHPSPLMGGFGLKHPPPQILIKNTPVPANPPAEFSATKFASFITQYSTGQVSVEIEWELQKENSKRWNPEVQYTSNYAKSANVDFTVDNNGLYTEPRPIGTRYLTRPL

SEQ ID NO: 7 - protein, 737 aa, Adeno-Associated Virus
  source 1..737: note = AAV-7
MAADGYLPDWLEDNLSEGIREWWDLKPGAPKPKANQQKQDNGRGLVLPGYKYLGPFNGLDKGEPVNAADAAALEHDKAYDQQLKAGDNPYLRYNHADAEFQERLQEDTSFGGNLGRAVFQAKKRVLEPLGLVEEGAKTAPAKKRPVEPSPQRSPDSSTGIGKKGQQPARKRLNFGQTGDSESVPDPQPLGEPPAAPSSVGSGTVAAGGGAPMADNNEGADGVGNASGNWHCDSTWLGDRVITTSTRTWALPTYNNHLYKQISSETAGSTNDNTYFGYSTPWGYFDFNRFHCHFSPRDWQRLINNNWGFRPKKLRFKLFNIQVKEVTTNDGVTTIANNLTSTIQVFSDSEYQLPYVLGSAHQGCLPPFPADVFMIPQYGYLTLNNGSQSVGRSSFYCLEYFPSQMLRTGNNFEFSYSFEDVPFHSSYAHSQSLDRLMNPLIDQYLYYLARTQSNPGGTAGNRELQFYQGGPSTMAEQAKNWLPGPCFRQQRVSKTLDQNNNSNFAWTGATKYHLNGRNSLVNPGVAMATHKDDEDRFFPSSGVLIFGKTGATNKTTLENVLMTNEEEIRPTNPVATEEYGIVSSNLQAANTAAQTQVVNNQGALPGMVWQNRDVYLQGPIWAKIPHTDGNFHPSPLMGGFGLKHPPPQILIKNTPVPANPPEVFTPAKFASFITQYSTGQVSVEIEWELQKENSKRWNPEIQYTSNFEKQTGVDFAVDSQGVYSEPRPIGTRYLTRNL

SEQ ID NO: 8 - protein, 738 aa, Adeno-Associated Virus
  source 1..738: note = AAV-8
MAADGYLPDWLEDNLSEGIREWWALKPGAPKPKANQQKQDDGRGLVLPGYKYLGPFNGLDKGEPVNAADAAALEHDKAYDQQLQAGDNPYLRYNHADAEFQERLQEDTSFGGNLGRAVFQAKKRVLEPLGLVEEGAKTAPGKKRPVEPSPQRSPDSSTGIGKKGQQPARKRLNFGQTGDSESVPDPQPLGEPPAAPSGVGPNTMAAGGGAPMADNNEGADGVGSSSGNWHCDSTWLGDRVITTSTRTWALPTYNNHLYKQISNGTSGGATNDNTYFGYSTPWGYFDFNRFHCHFSPRDWQRLINNNWGFRPKRLSFKLFNIQVKEVTQNEGTKTIANNLTSTIQVFTDSEYQLPYVLGSAHQGCLPPFPADVFMIPQYGYLTLNNGSQAVGRSSFYCLEYFPSQMLRTGNNFQFTYTFEDVPFHSSYAHSQSLDRLMNPLIDQYLYYLSRTQTTGGTANTQTLGFSQGGPNTMANQAKNWLPGPCYRQQRVSTTTGQNNNSNFAWTAGTKYHLNGRNSLANPGIAMATHKDDEERFFPSNGILIFGKQNAARDNADYSDVMLTSEEEIKTTNPVATEEYGIVADNLQQQNTAPQIGTVNSQGALPGMVWQNRDVYLQGPIWAKIPHTDGNFHPSPLMGGFGLKHPPPQILIKNTPVPADPPTTFNQSKLNSFITQYSTGQVSVEIEWELQKENSKRWNPEIQYTSNYYKSTSVDFAVNTEGVYSEPRPIGTRYLTRNL

SEQ ID NO: 9 - protein, 736 aa, Adeno-Associated Virus
  source 1..736: note = AAV-9
MAADGYLPDWLEDNLSEGIREWWALKPGAPQPKANQQHQDNARGLVLPGYKYLGPGNGLDKGEPVNAADAAALEHDKAYDQQLKAGDNPYLKYNHADAEFQERLKEDTSFGGNLGRAVFQAKKRLLEPLGLVEEAAKTAPGKKRPVEQSPQEPDSSAGIGKSGAQPAKKRLNFGQTGDTESVPDPQPIGEPPAAPSGVGSLTMASGGGAPVADNNEGADGVGSSSGNWHCDSQWLGDRVITTSTRTWALPTYNNHLYKQISNSTSGGSSNDNAYFGYSTPWGYFDFNRFHCHFSPRDWQRLINNNWGFRPKRLNFKLFNIQVKEVTDNNGVKTIANNLTSTVQVFTDSDYQLPYVLGSAHEGCLPPFPADVFMIPQYGYLTLNDGSQAVGRSSFYCLEYFPSQMLRTGNNFQFSYEFENVPFHSSYAHSQSLDRLMNPLIDQYLYYLSKTINGSGQNQQTLKFSVAGPSNMAVQGRNYIPGPSYRQQRVSTTVTQNNNSEFAWPGASSWALNGRNSLMNPGPAMASHKEGEDRFFPLSGSLIFGKQGTGRDNVDADKVMITNEEEIKTTNPVATESYGQVATNHQSAQAQAQTGWVQNQGILPGMVWQDRDVYLQGPIWAKIPHTDGNFHPSPLMGGFGMKHPPPQILIKNTPVPADPPTAFNKDKLNSFITQYSTGQVSVEIEWELQKENSKRWNPEIQYTSNYYKSNNVEFAVNTEGVYSEPRPIGTRYLTRNL

SEQ ID NO: 10 - protein, 738 aa, Adeno-Associated Virus
  source 1..738: note = AAV-10
MAADGYLPDWLEDNLSEGIREWWDLKPGAPKPKANQQKQDDGRGLVLPGYKYLGPFNGLDKGEPVNAADAAALEHDKAYDQQLKAGDNPYLRYNHADAEFQERLQEDTSFGGNLGRAVFQAKKRVLEPLGLVEEAAKTAPGKKRPVEPSPQRSPDSSTGIGKKGQQPAKKRLNFGQTGESESVPDPQPIGEPPAGPSGLGSGTMAAGGGAPMADNNEGADGVGSSSGNWHCDSTWLGDRVITTSTRTWALPTYNNHLYKQISNGTSGGSTNDNTYFGYSTPWGYFDFNRFHCHFSPRDWQRLINNNWGFRPKRLSFKLFNIQVKEVTQNEGTKTIANNLTSTIQVFTDSEYQLPYVLGSAHQGCLPPFPADVFMIPQYGYLTLNNGSQAVGRSSFYCLEYFPSQMLRTGNNFEFSYTFEDVPFHSSYAHSQSLDRLMNPLIDQYLYYLSRTQSTGGTQGTQQLLFSQAGPANMSAQAKNWLPGPCYRQQRVSTTLSQNNNSNFAWTGATKYHLNGRDSLVNPGVAMATHKDDEERFFPSSGVLMFGKQGAGRDNVDYSSVMLTSEEEIKTTNPVATEQYGVVADNLQQANTGPIVGNVNSQGALPGMVWQNRDVYLQGPIWAKIPHTDGNFHPSPLMGGFGLKHPPPQILIKNTPVPADPPTTFSQAKLASFITQYSTGQVSVEIEWELQKENSKRWNPEIQYTSNYYKSTNVDFAVNTEGTYSEPRPIGTRYLTRNL

SEQ ID NO: 11 - protein, 733 aa, Adeno-Associated Virus
  source 1..733: note = AAV-13
MTDGYLPDWLEDNLSEGVREWWALQPGAPKPKANQQHQDNARGLVLPGYKYLGPGNGLDKGEPVNAADAAALEHDKAYDQQLKAGDNPYLKYNHADAEFQERLQEDTSFGGNLGRAVFQAKKRILEPLGLVEEAAKTAPGKKRPVEQSPAEPDSSSGIGKSGQQPARKRLNFGQTGDTESVPDPQPLGQPPAAPSGVGSTTMASGGGAPMADNNEGADGVGNSSGNWHCDSQWLGDRVITTSTRTWALPTYNNHLYKQISSQSGATNDNHYFGYSTPWGYFDFNRFHCHFSPRDWQRLINNNWGFRPKRLNFKLFNIQVKEVTQNDGTTTIANNLTSTVQVFTDSEYQLPYVLGSAHQGCLPPFPADVFMVPQYGYLTLNNGSQAVGRSSFYCLEYFPSQMLRTGNNFQFSYTFEDVPFHSSYAHSQSLDRLMNPLIDQYLYYLNRTQTASGTQQSRLLFSQAGPTSMSLQAKNWLPGPCYRQQRLSKQANDNNNSNFPWTGATKYHLNGRDSLVNPGPAMASHKDDKEKFFPMHGTLIFGKEGTNANNADLENVMITDEEEIRTTNPVATEQYGTVSNNLQNSNAGPTTGTVNHQGALPGMVWQDRDVYLQGPIWAKIPHTDGHFHPSPLMGGFGLKHPPPQIMIKNTPVPANPPTNFSAAKFASFITQYSTGQVSVEIEWELQKENSKRWNPEIQYTSNYNKSVNVDFTVDTNGVYSEPRPIGTRYLTRNL

SEQ ID NO: 12 - protein, 735 aa, Adeno-Associated Virus
  source 1..735: note = BCD_0105
MAADGYLPDWLEDTLSEGIRQWWKLKPGPPPPKPNQQHRDDSRGLVLPGYKYLGPFNGLDKGEPVNEADAAALEHDKAYDHQLKQGDNPYLKYNHADAEFQERLQEDTSFGGNLGRAVFQAKKRVLEPLGLVEEAVKTAPGKKRPVEHSPAEPDSSSGTGKSGQQPARKRLNFGQTGDTESVPDPQPIGEPPAAPSGVGSNTMASGGGAPMADNNEGADGVGNSSGNWHCDSTWMGDRVITTSTRTWALPTYNNHLYKQISSESGATNDNHYFGYSTPWGYFDFNRFHCHFSPRDWQRLINNNWGFRPKKLNFKLFNIQVKEVTQNDGTTTIANNLTSTVQVFTDSEYQLPYVLGSAHQGCLPPFPADVFMVPQYGYLTLNNGSQAVGRSSFYCLEYFPSQMLRTGNNFTFSYTFEDVPFHSSYAHSQSLDRLMNPLIDQYLYYLSKTNTPSGTTTQSRLQFSQAGASDIRDQSRNWLPGPCYRQQRVSKTAADNNNSEYSWTGATKYHLNGRDSLVNPGPAMASHKDDEEKFFPQSGVLIFGKQGSEKTNVDIEKVMITDEEEIRTTNPVATEQYGAVSTNLQSGNTQAATSDVNTQGVLPGMVWQDRDVYLQGPIWAKIPHTDGHFHPSPLMGGFGLKHPPPQILIKNTPVPANPSTTFSAAKFASFITQYSTGQVSVEIEWELQKENSKRWNPEIQYTSNYNKSVNVEFTVDTNGVYSEPRPIGTRYLTRNL

SEQ ID NO: 13 - protein, 726 aa, Adeno-Associated Virus
  source 1..726: note = BCD_0106
MSFVDHPPDWLEEVGEGLHEFLELEAGPPKPKPNQQKQDNARGLVLPGYNYLGPFNGLDKGEPVNRADAVAREHDISYNEQLQAGDNPYLKYNHADAEFQEKLKDDTSFGGNLGKAIFQAKKRVLEPFGLVEAPVKTAPAKKRPIEKSPAEPSSSKGIGKAGQQPARKRLNFGQTGDADSAADPQPLGEPPAAPSGLGTGTMASGSGAPMADNNEGADGVGNASGNWHCDSTWLGDRVITTSTRTWALPTYNNHLYKQISSQSGASNDNHYFGYSTPWGYFDFNRFHCHFSPRDWQRLINNNWGFRPKRLNFKLFNIQVKEVTENEGTKTIANNLTSTVQVFADSEYQLPYVLGSAHQGCFPPFPADVFMIPQYGYLTLNNGSHAMGRSSFYCLEYFPSQMLRTGNNFTFSYTFEDVPFHSSYAHSQSLDRLMNPLIDQYLYYLSKTQNGLGFSQAGPNSMRDQSRNWLPGPCFRQQRISTVPTQNNNAEFSWTGATKYHLNGRNSAMNPGPAMATHKDDEERFFPQNGVLIFGKQGADKTNAVLEKVIVTDEEEIRATNPVATEEYGVVATNLQNGNTQATTNDVNAQGILPGMVWQDRDVYLQGPIWAKIPYTDGHFHPSPLMGGFGLKRPPPQILIKNTPVPGDPPTTFSQNKLASFITQYSTGQVSVEIEWELQKENSKRWNPEVQYTSNYNKSVNVDFTVNGDGVYSEPRTIGTRYLTRNL

SEQ ID NO: 14 - protein, 736 aa, Adeno-Associated Virus
  source 1..736: note = BCD_0112
MAADGYLPDWLEDNLSEGIREWWALKPGAPQPKANQQHQDNARGLVLPGYKYLGPGNGLDKGEPVNAADAAALEHDKAYDQQLKAGDNPYLKYNHADAEFQERLKEDTSFGGNLGRAVFQAKKRLLEPLGLVEEAAKTAPGKKRPIEQSPQEPDSSVGIGKSGAQPAKKRLNFGQTGDTESVPDPQPIGEPPAAPSGVGSLTMASGGGAPVADNNEGADGVGSSSGNWHCDSQWLGDRVITTSTRTWALPTYNNHLYKQISNSTSGGSSNDNAYFGYSTPWGYFDFNRFHCHFSPRDWQRLINNNWGFRPKRLNFKLFNIQVKEVTDNNGVKTIANNLTSTVQVFTDSDYQLPYVLGSAHEGCLPPFPADVFMIPQYGYLTLNDGSQAVGRSSFYCLEYFPSQMLRTGNNFTFSYEFENVPFHSSYAHSQSLDRLMNPLIDQYLYYLSKTINGSGQNQQTLKFSVAGPSNMAVQGRNYIPGPSYRQQRVSTTVTQNNNSEFAWPGASSWALNGRNSLMNPGPAMASHKEGEDRFFPLSGSLIFGKQGTGRDNVDADKVMITNEEEIKTTNPVATESYGQVATNHQSAQAQAQTGWVQNQGILPGMVWQDRDVYLQGPIWAKIPHTDGNFHPSPLMGGFGMKHPPPQILIKNTPVPADPPTAFNKDKLNSFITQYSTGQVSVEIEWELQKENSKRWNPEIQYTSNYYKSNNVEFAVNTEGVYSEPRPIGTRYLTRNL

SEQ ID NO: 15 - protein, 735 aa, Adeno-Associated Virus
  source 1..735: note = BCD_0113
MAADGYLPDWLEDTLSEGIRQWWKLKPGPPPPKPAERHKDDSRGLVLPGYKYLGPFNGLDKGEPVNEADAAALEHDKAYDRQLDSGDNPYLKYNHADAEFQERLKEDTSFGGNLGRAVFQAKKRVLEPLGLVEEPVKTAPGKKRPVEHSPAEPDSSSGIGKAGQQPARKRLNFGQTGDADSVPDPQPLGQPPAAPSGLGSTTMATGSGAPVADNNEGADGVGNSSGNWHCDSQWLGDRVITTSTRTWALPTYNNHLYKQISSQSGASNDNHYFGYSTPWGYFDFNRFHCHFSPRDWQRLINNNWGFRPKRLNFKLFNIQVKEVTQNDGTTTIANNLTSTVQVFTDSEYQLPYVLGSAHQGCLPPFPADVFMVPQYGYLTLNNGSQAVGRSSFYCLEYFPSQMLRTGNNFQFSYTFEDVPFHSSYAHSQSLDRLMNPLIDQYLYYLNKTQSNSGTLQQSRLLFSQAGPTSMSLQAKNWLPGPCYRQQRLSKQANDNNNSNFPWTAATKYHLNGRDSLVNPGPAMASHKDDEEKFFPMHGTLIFGKQGTNANDADLDNVMITDEEEIRTTNPVATEQYGYVSNNLQNSNTGPTTGTVNHQGALPGMVWQDRDVYLQGPIWAKIPHTDGHFHPSPLMGGFGLKHPPPQIMIKNTPVPANPPTNFSSAKFASFITQYSTGQVSVEIEWELQKENSKRWNPEIQYTSNYNKSVNVDFTVDTNGVYSEPRPIGTRYLTRNL

SEQ ID NO: 16 - protein, 735 aa, Adeno-Associated Virus
  source 1..735: note = BCD_0114
MAADGYLPDWLEDTLSEGIRQWWKLKPGPPPPKPAERHKDDSRGLVLPGYKYLGPFNGLDKGEPVNEADAAALEHDKAYDRQLDSGDNPYLKYNHADAEFQERLKEDTSFGGNLGRAVFQAKKRVLEPLGLVEEPVKTAPGKKRPVEHSPAEPDSSSGTGKAGQQPARKRLNFGQTGDADSVPDPQPLGQPPAAPSGLGSTTMATGSGAPVADNNEGADGVGNSSGNWHCDSQWLGDRVITTSTRTWALPTYNNHLYKQISSQSGASNDNHYFGYSTPWGYFDFNRFHCHFSPRDWQRLINNNWGFRPKRLNFKLFNIQVKEVTQNDGTTTIANNLTSTVQVFTDSEYQLPYVLGSAHQGCLPPFPADVFMVPQYGYLTLNNGSQAVGRSSFYCLEYFPSQMLRTGNNFQFSYTFEDVPFHSSYAHSQSLDRLMNPLIDQYLYYLNKTQSNSGTLQQSRLLFSQAGPTSMSLQAKNWLPGPCYRQQRLSKQANDNNNSNFPWTAATKYHLNGRDSLVNPGPAMASHKDDEEKFFPMHGTLIFGKQGTNANDADLDNVMITDEEEIRTTNPVATEQYGYVSNNLQNSNTGPTTGTVNHQGALPGMVWQDRDVYLQGPIWAKIPHTDGHFHPSPLMGGFGLKHPPPQIMIKNTPVPANPPTNFSSAKFASFITQYSTGQVSVEIEWELQKENSKRWNPEIQYTSNYNKSVNVDFTVDTNGVYSEPRPIGTRYLTRNL

SEQ ID NO: 17 - protein, 735 aa, Adeno-Associated Virus
  source 1..735: note = BCD_0115
MAADGYLPDWLEDTLSEGIRQWWKLKPGPPPPKPAERHKDDSRGLVLPGYKYLGPFNGLDKGEPVNEADAAALEHDKAYDRQLDSGDNPYLKYNHADAEFQERLKEDTSFGGNLGRAVFQAKKRVLEPLGLVEEPVKTAPGKKRPVEHSPAEPDSSSGTGKAGQQPARKRLNFGQTGDADSVPDPQPLGQPPAAPSGLGSTTMATGSGAPMADNNEGADGVGNSSGNWHCDSQWLGDRVITTSTRTWALPTYNNHLYKQISSQSGASNDNHYFGYSTPWGYFDFNRFHCHFSPRDWQRLINNNWGFRPKRLNFKLFNIQVKEVTQNDGTTTIANNLTSTVQVFTDSEYQLPYVLGSAHQGCLPPFPADVFMVPQYGYLTLNNGSQAVGRSSFYCLEYFPSQMLRTGNNFTFSYTFEDVPFHSSYAHSQSLDRLMNPLIDQYLYYLNKTQSNSGTLQQSRLLFSQAGPNSMSLQAKNWLPGPCYRQQRLSKQANDNNNSNFPWTAATKYHLNGRDSLVNPGPAMASHKDDEEKFFPMHGTLIFGKQGANANDADLDNVMITDEEEIRTTNPVATEQYGYVSNNLQNSNTGPTTGTVNHQGALPGMVWQDRDVYLQGPIWAKIPHTDGHFHPSPLMGGFGLKHPPPQIMIKNTPVPANPPTNFSAAKFASFITQYSTGQVSVEIEWELQKENSKRWNPEIQYTSNYNKSVNVDFTVDTNGVYSEPRPIGTRYLTRNL

SEQ ID NO: 18 - protein, 735 aa, Adeno-Associated Virus; identical to SEQ ID NO: 15
  source 1..735: note = BCD_0117

SEQ ID NO: 19 - protein, 728 aa, Adeno-Associated Virus
  source 1..728: note = BCD_0120
MAADGYLPDWLEDNLSEGIREWWNLKPGAPKPKANQQKQDHGRGLVLPGYKYLGPFNGLDKGEPVNEADAAALEHDKAYDQQLKAGDNPYLRYNHADAEFQERLQEDTSFGGNLGRAVFQAKKRVLEPLGLVEEGAKTAPGKKRPIESPDSSTGIGKKGQQPAKKKLNFGQTGDSESVPDPQPLGEPPAAPSGLGSGTMAAGGGAPMADNNEGADGVGNASGNWHCDSTWLGDRVITTSTRTWALPTYNNHLYKQISSQSGATNDNHFFGYSTPWGYFDFNRFHCHFSPRDWQRLINNNWGFRPRKLRFKLFNIQVKEVTTNDGVTTIANNLTSTIQVFSDSEYQLPYVLGSAHQGCLPPFPADVFMIPQYGYLTLNNGSQSVGRSSFYCLEYFPSQMLRTGNNFEFSYTFEEVPFHSSYAHSQSLDRLMNPLIDQYLYYLARTQSTTGSTKELQFHQAGPNTMAEQSKNWLPGPCYRQQRLSKNRDSNNNSNFAWTGATTYHLNGRNSLTNPGVAMATNKDDEDHFFPINGVLVFGKTGAANKTTLENVLMTSEEEIKTTNPVATEEYGVVSSNLQSSTAGPQTQTVNSQGALPGMVWQNRDVYLQGPIWAKIPHTDGNFHPSPLMGGFGLKHPPPQILIKNTPVPANPPEVFTPAKFASFITQYSTGQVSVEIEWELQKENSKRWNPEIQYTSNYAKSNNVEFAVNNQGVYTEPRPIGTRYLTRNL

SEQ ID NO: 20 - protein, 736 aa, Adeno-Associated Virus
  source 1..736: note = BCD_0125
MAADGYLPDWLEDNLSEGIREWWNLKPGAPKPKANQQKQDHGRGLVLPGYKYLGPFNGLDKGEPVNEADAAALEHDKAYDQQLKAGDNPYLRYNHADAEFQERLQEDTSFGGNLGRAVFQAKKRVLEPLGLVEEGAKTAPGKKRPVEQSPQEPDSSSGIGKTGQQPAKKRLNFGQTGDSESVPDPQPIGEPPAAPSGLGSNTMASGGGAPMADNNEGADGVGNSSGNWHCDSTWLGDRVITTSTRTWALPTYNNHLYKQISNGTSGGSTNDNTYFGYSTPWGYFDFNRFHCHFSPRDWQRLINNNWGFRPKKLNFKLFNIQVKEVTTNEGTKTIANNLTSTVQVFTDSEYQLPYVLGSAHQGCLPPFPADVFMIPQYGYLTLNNGSQALGRSSFYCLEYFPSQMLRTGNNFQFSYTFEDVPFHSSYAHSQSLDRLMNPLIDQYLYYLVRTQTTGTGGTQTLAFSQGGPSTMANQARNWVPGPCYRQQRVSTTTNQNNNSNFAWTGAAKFKLNGRDSLMNPGVAMASHKDDEDRFFPSSGVLIFGKQGANKDGADYSQVLITDEEEIKATNPVATEEYGSVAINNQNASTQAQTGLVHNQGVIPGMVWQNRDVYLQGPIWAKIPHTDGNFHPSPLMGGFGLKHPPPQILIKNTPVPADPPLTFNEAKLNSFITQYSTGQVSVEIEWELQKENSKRWNPEIQYTSNYYKSTNVDFAVNTEGVYSEPRPIGTRYLTRNL

SEQ ID NO: 21 - protein, 738 aa, Adeno-Associated Virus
  source 1..738: note = BCD_0126
MAADGYLPDWLEDNLSEGIREWWNLKPGAPKPKANQQKQDHGRGLVLPGYKYLGPFNGLDKGEPVNEADAAALEHDKAYDQQLKAGDNPYLRYNHADAEFQERLQEDTSFGGNLGRAVFQAKKRVLEPLGLVESPVKTAPGKKRPVEPSPQRSPDSSTGIGKKGQQPAKKRLNFGQTGDSESVPDPQPIGEPPAGPSGLGSGTMAAGGGAPMADNNEGADGVGSSSGNWHCDSTWLGDRVITTSTRTWALPTYNNHLYKQISNGTSGGSTNDNTYFGYSTPWGYFDFNRFHCHFSPRDWQRLINNNWGFRPKRLNFKLFNIQVKEVTQNEGTKTIANNLTSTIQVFTDSEYQLPYVLGSAHQGCLPPFPADVFMIPQYGYLTLNNGSQAVGRSSFYCLEYFPSQMLRTGNNFEFSYQFEDVPFHSSYAHSQSLDRLMNPLIDQYLYYLSRTQSTGGTAGTQQLLFSQAGPNNMSAQAKNWLPGPMYRQQRVSTTLSQNNNSNFAWTGATKYHLNGRDSLVNPGVAMATHKDDEERFFPSSGVLMFGKQGAGKDNVDYSRVMLTSEEEIKTTNPVATEQYGVVADNLQQQNVAPIVGAVNSQGALPGMVWQNRDVYLQGPIWAKIPHTDGNFHPSPLMGGFGLKHPPPQILIKNTPVPADPPTTFSQAKLASFITQYSTGQVSVEIEWELQKENSKRWNPEIQYTSNYYKSTNVDFAVNTDGNYSEPRPIGTRYLTRNL

SEQ ID NO: 22 - protein, 736 aa, Adeno-Associated Virus
  source 1..736: note = BCD_0127
MAADGYLPDWLEDNLSEGIREWWNLKPGAPKPKANQQKQDNGRGLVLPGYKYLGPFNGLDKGEPVNAADAAALEHDKAYDQQLQAGDNPYLRYNHADAEFQERLQEDTSFGGNLGRAVFQAKKRVLEPLGLVESPVKTAPGKKRPVEPSPQRSPDSSTGIGKKGQQPAKKRLNFGQTGDSESVPDPQPIGEPPAGPSGLGSGTMAAGGGAPMADNNEGADGVGSSSGNWHCDSTWLGDRVITTSTRTWALPTYNNHLYKQISSQSGATNDNHFFGYSTPWGYFDFNRFHCHFSPRDWQRLINNNWGFRPRKLRFKLFNIQVKEVTQNEGTKTIANNLTSTIQVFTDSEYQLPYVLGSAHQGCLPPFPADVFMIPQYGYLTLNNGSQAVGRSSFYCLEYFPSQMLRTGNNFEFSYQFEDVPFHSSYAHSQSLDRLMNPLIDQYLYYLSRTQSTGGTTGTQKLLFSQAGPNNMSAQAKNWLPGPCYRQQRVSTTTNQNNNSNFAWTGATKYHLNGRDSLVNPGVAMATHKDDEERFFPSSGVLMFGKQGAGKDNVDYSSVMLTSEEEIKTTNPVATEEYGVVADNLQQQNVAPIVGAVNSQGALPGMVWQNRDVYLQGPIWAKIPHTDGNFHPSPLMGGFGLKHPPPQILIKNTPVPADPPTTFNQAKLASFITQYSTGQVSVEIEWELQKENSKRWNPEIQYTSNYYKSTNVDFAVNTEGTYSEPRPIGTRYLTRNL

SEQ ID NO: 23 - protein, 741 aa, Adeno-Associated Virus
  source 1..741: note = BCD_0135
MAADGYLPDWLEDNLSEGIREWWALKPGAPQPKANQQHQDNGRGLVLPGYKYLGPFNGLDKGEPVNEADAAALEHDKAYDKQLEQGDNPYLKYNHADAEFQERLQEDTSFGGNLGRAVFQAKKRILEPLGLVEEAAKTAPGKKRPLEKTPNQPTDTQAAGQTPAKKRPQGEQSGNPARRRLDFNQQPAEPIGEPPAAPSGVGSTTMATGGGAPVASDNEGADGVGNSSGNWHCDSTWLGDRVITTSTRTWALPTYNNHLYKQISSGTSGGASNNNAYFGYSTPWGYFDFNRFHCHFSPRDWQRLINNNWGFRPKRLSFKLFNIQVKEVTQNDGTTTIANNLTSTVQVFTDSEYQLPYVLGSAHQGCLPPFPADVFMIPQYGYLTLNDGSQAVGRSSFYCLEYFPSQMLRTGNNFSFSYVFEDVPFHSSYAHSQSLDRLMNPLIDQYLYYLNRTQGTTSGTTNQSRLLFSQAGPQSMSLQAKNWLPGPCYRQQRLSKTANANHNSNFTWTGATTYHLNGRDSLVNPGPAMASHKDGEEQFFPMTGNLVFGKQGMGSSNVDIENVMITDEEEIRTTNPVATEQYGNVADNLQSSNTAPIVGNVNSQGALPGMVWQDRDVYLQGPIWAKIPHTDGHFHPSPLMGGFGLKHPPPQILIKNTPVPANPPTSFNPAKFSSFITQYSTGQVSVEIEWELQKENSKRWNPEIQYTSNYNKSVNVDFTVDTNGVYSEPRPIGTRYLTRNL

SEQ ID NO: 24 - protein, 735 aa, Adeno-Associated Virus
  source 1..735: note = BCD_0137
MAADGYLPDWLEDTLSEGIRQWWKLKPGPPPPKPAERHKDDSRGLVLPGYKYLGPFNGLDKGEPVNEADAAALEHDKAYDRQLDSGDNPYLKYNHADAEFQERLKEDTSFGGNLGRAVFQAKKRILEPLGLVEEPVKTAPGKKRPVEHSPAEPDSSSGTGKSGQQPARKRLNFGQTGDADSVPDPQPLGQPPAAPSGLGTNTMASGSGAPMADNNEGADGVGNSSGNWHCDSTWMGDRVITTSTRTWALPTYNNHLYKQISSQSGASNDNHYFGYSTPWGYFDFNRFHCHFSYRDWETLINNNWGFRPKRLSFKLFNIQVKEVTQNDGTTTIANNLTSTVQVFTDSEYQLPYVLGSAHQGCLPPFPADVFMVPQYGYLTLNNGSQAVGRSSFYCLEYFPSQMLRTGNNFTFSYTFEDVPFHSSYAHSQSLDRLMNPLIDQYLYYLSRTNTPSGTTTMSRLQFSQAGASDIRDQSRNWLPGPCYRQQRVSKTAADNNNSDYSWTGATKYHLNGRDSLVNPGPAMASHKDDEEKYFPQSGVLIFGKQDSGKTNVDIEKVMITDEEEIRTTNPVATEQYGSVSTNLQSGNTQAATSDVNTQGVLPGMVWQDRDVYLQGPIWAKIPHTDGHFHPSPLMGGFGLKHPPPQILIKNTPVPANPSTTFSAAKFASFITQYSTGQVSVEIEWELQKENSKRWNPEIQYTSNYNKSVNVDFTVDTNGVYSEPRPIGTRYLTRNL

SEQ ID NO: 25 - protein, 736 aa, Adeno-Associated Virus
  source 1..736: note = BCD_0146
MAADGYLPDWLEDNLSEGIREWWNLKPGAPKPKANQQKQDTGRGLVLPGYTYLGPFNGLDKGEPVNAADAAALEHDKAYDQQLQAGDNPYLRYNHADAEFQERLQEDTSFGGNLGRAVFQAKKRVLEPLGLVESPVKTAPGKKRPVEPSPQRSPDSSTGIGKKGQQPAKKRLNFGQTGDSESVPDPQPIGEPPAGPSGLGSGTMAAGGGAPMADNNEGADGVGSSSGNWHCDSTWLGDRVITTSTRTWALPTYNNHLYKQISSQSGATNDNHFFGYSTPWGYFDFNRFHCHFSPRDWQRLINNNWGFRPRKLRFKLFNIQVKEVTQNEGTKTIANNLTSTIQVFTDSEYQLPYVLGSAHQGCLPPFPADVFMIPQYGYLTLNNGSQAVGRSSFYCLEYFPSQMLRTGNNFEFSYQFEDVPFHSSYAHSQSLDRLMNPLIDQYLYYLSRTQSTGGTTRTQKLLFSQAGPNNMSAQAKNWLPGPCYRQQRVSTTTNQNNNSNFAWTGATKYHLNGRDSLVNPGVAMATHKDDEERFFPSSGVLMFGKQGAGKDNVDYSSVMLTSEEEIKTTNPVATEEYGVVADNLQQQNVAPIVGAVNSQGALPGMVWQNRDVYLQGPIWAKIPHTDGHFHPSPLMGGFGLKHPPPQILIKNTPVPANPPAEFSATKFASFITQYSTGQVSVEIEWELQKENSKRWNPEVQYTSNYAKSANVDFTVDNNGLYTEPRPIGTRYLTRNL

SEQ ID NO: 26 - protein, 741 aa, Adeno-Associated Virus
  source 1..741: note = BCD_0157
MAADGYLPDWLEDNLSEGIREWWALKPGAPQPKANQQHQDNGRGLVLPGYKYLGPFNGLDKGEPVNEADAAALEHDKAYDKQLEQGDNPYLKYNHADAEFQERLQEDTSFGGNLGRAVFQAKKRILEPLGLVEEAAKTAPGKKRPLEKTPNQPTDTQAAGQTPAKKRQQGEQSGDPARRRLDFNQQPAEPIGEPPAAPSGVGSTTMATGGGAPVASDNEGADGVGNSSGNWHCDSTWLGDRVITTSTRTWALPTYNNHLYKQISSGTSGGASNNNAYFGYSTPWGYFDFNRFHCHFSPRDWQRLINNNWGFRPKRLSFKLFNIQVKEVTQNDGTTTIANNLTSTVQVFTDSEYQLPYVLGSAHQGCLPPFPADVFMIPQYGYLTLNDGSQAVGRSSFYCLEYFPSQMLRTGNNFSFSYVFEDVPFHSSYAHSQSLDRLMNPLIDQYLYYLNRTQGTTSGTTNQSRLLFSQAGPQSMSLQAKNWLPGPCYRQQRLSKTANANHNSNFTWTGATTYHLNGRDSLVNPGPAMASHKDGEEQFFPMTGNLVFGKQGMGSSNVDIENVMITDEEEIRTTNPVATEQYGNVADNLQSSNTAPIVGNVNSQGALPGMVWQDRDVYLQGPIWAKIPHTDGHFHPSPLMGGFGLKHPPPQILIKNTPVPANPPTSFNPAKFSSFITQYSTGQVSVEIEWELQKENSKRWNPEIQYTSNYNKSVNVDFTVDTNGVYSEPRPIGTRYLTRNL

SEQ ID NO: 27 - protein, 739 aa, Adeno-Associated Virus
  source 1..739: note = BCD_0159
MAADGYLPDWLEDNLSEGIREWLKLKAGAPQPKPNQQHQDNGRGLVLPGYKYLGPFNGLDKGEPVNEADAAALDHDKAYDKQLQAGDNPYLKYNHADAEFQERLEKDTSFGGNLGKAVFQAKKRVLEPFGLVEAPVKTAPGKKRPLEKTPNQPTDSEAAGQAPAKKKQHGEESGDPAKRRLSFSEKAPDQPPAPNPANPPSVGPATMASGGGSPVADNNEGADGVGNSSGNWHCDSTWLGDRVITTSTRTWALPTYNNHLYKQISSQNGATNDNHYFGYSTPWGYFDFNRFHCHFSPRDWQRLINNNWGFRPKRLSFKLFNIQVKEVTQTDGTTTIANNLTSTIQVFTDSEYQLPYVLGSAHEGCLPPFPADVFMIPQYGYLTLNNGSQAVGRSSFYCLEYFPSQMLRTGNNFSYSYVFEDVPFHSSYAHSQSLDRLMNPLIDQYLYYLSKTQGTNATVQGAKLQFSQAGPSNMRDQARNWMPGPCYRQQRLSKNAGDNSNSEYAWTAATKYHLNGRDSLVNPGPAMASHKDDEEKFFPMNGTLIFGKNGTGKSNVDIENVMITDEEEIRTTNPVATEQYGVVSDNLQSSNTRPVTGDVDSQGVLPGMVWQDRDVYLQGPIWAKIPHTDGHFHPSPLMGGFGLKHPPPQIMIKNTPVPANPATVFSPEKFASFITQYSTGQVSVEIEWELQKENSKRWNPEIQYTSNYNKSVNVDFTVNADGVYSEPRPIGTRYLTRNL

SEQ ID NO: 28 - protein, 739 aa, Adeno-Associated Virus
  source 1..739: note = BCD_0160
MAADGYLPDWLEDNLSEGIREWWALKPGAPQPKANQQHQDNGRGLVLPGYKYLGPFNGLDKGEPVNEADAAALEHDKAYDKQLEQGDNPYLKYNHADAEFQERLQEDTSFGGNLGRAVFQAKKRILEPLGLVEEAAKTAPGKKRPLEKTPNQPTDTQAAGQTPAKKRQQGEQSGDSARRQLDFDPQPAAPIGQPPAAPSPVGSNTMASGGGGPMADDNQGADGVGNASGNWHCDSTWLGDRVITTSTRTWVLPTYNNHIYKQISSESGATNDNHYFGYSTPWGYFDFNRFHCHFSPRDWQRLINNNWGFRPKRLNFKIFNIQVKEVTQIEGGSTIANNLTSTIQVFADSEYQLPYVLGSAHQGCLPPFPADVFMIPQYGYLTLNNGSQSVGRSSFYCLEYFPSQMLRTGNNFQFSYTFESVPFHSSYAHSQSLDRIMNPLVDQYLYYLARTQTGTGSTTSNTRQLQFYQAGPSNMADQSRNWLPGPMYRQQRVSKTLDQNSNTNFAWTAASKYNLNGRKSLVNPGISMATHKDDEERFFPQHGVLVFGKTNATNKTTLENVLVTDEEEVKATNPVGTEEYGTVSSNLQSNTTNPTTETVNNQGILPGMVWQDRDVYLQGPIWAKIPHTDGHFHPSPLMGGFGLKHPPPQILIKNTPVPANPPETFTTSKFASYITQYSTGQVSVEIEWELQKENSKRWNPEIQYTSNYAKSNNVEFSVDAAGVYSEPRPIGTRYLTRNL

SEQ ID NO: 29 - protein, 739 aa, Adeno-Associated Virus
  source 1..739: note = BCD_0161
MAADGYLPDWLEDNLSEGIREWWALKPGAPQPKANQQHQDNGRGLVLPGYKYLGPFNGLDKGEPVNEADAAALEHDKAYDKQLEQGDNPYLKYNHADAEFQERLQEDTSFGGNLGRAVFQAKKRILEPLGLVEEAAKTAPGKKRPLEKTPNQPTDTQAAGQTPAKKRQQGEQSGDSARRQLDFDPQPAAPIGQPPAAPSPVGSNTMASGGGGPMADDNQGADGVGNASGNWHCDSTWLGDRVITTSTRTWVLPTYNNHIYKQISSESGATNDNHYFGYSTPWGYFDFNRFHCHFSPRDWQRLINNNWEFRPKRLNFKIFNIQVKEVTQIEGGSTIANNLTSTIQVFADSEYQLPYVLGSAHQGCLPPFPADVFMIPQYGYLTLNNGSQSVGRSSFYCLEYFPSQMLRTGNNFQFSYTFESVPFHSSYAHSQSLDRIMNPLVDQYLYYLARTQTGTGSTTSNTRQLQFYQAGPSNMADQSRNWLPGPMYRQQRVSKTLDQNSNTNFAWTAASKYNLNGRKSLVNPGISMATHKDDEERFFPQHGVLVFGKTNATNKTTLENVLVTDEEEVKATNPVGTEEYGTVSSNLQSNTTNPTTETVNNQGILPGMVWQDRDVYLQGPIWAKIPHTDGHFHPSPLMGGFGLKHPPPQILIKNTPVPANPPETFTTSKFASYITQYSTGQVSVEIEWELQKENSKRWNPEIQYTSNYAKSNNVEFSVDAAGVYSEPRPIGTRYLTRNL

SEQ ID NO: 30 - protein, 739 aa, Adeno-Associated Virus
  source 1..739: note = BCD_0165
MAADGYLPDWLEDNLSEGIREWWALKPGAPQPKANQQHQDNSRGLVLPGYKYLGPFNGLDKGEPVNEADAAALEHDKAYDKQLEQGDNPYLKYNHADAEFQERLQEDTSFGGNLGRAAFQAKKRILEPLGLVEEAAKTAPGKKRPLEKTPNQPTDTQAAGQTPAKKRPQGEQSGDSARRQLDFDPQPAAPIGQPPAAPSPVGSNTMASGGGGPMADDNQGADGVGNASGNWHCDSTWLGDRVITTSTRTWVLPTYNNHIYKQISSESGATNDNHYFGYSTPWGYFDFNRFHCHFSPRDWQRLINNNWGFRPKRLNFKIFNIQVKEVTQIEGGSTIANNLTSTIQVFADSEYQLPYVLGSAHQGCLPPFPADVFMIPQYGYLTLNDGSQSVGRSSFYCLEYFPSQMLRTGNNFQFSYTFESVPFHSSYAHSQSLDRIMNPLVDQYLYYLARTQTGTGSTTSNTRQLQFYQAGPSNMADQSRNWLPGPMYRQQRVSKTLDQNSNTNFAWTAASKYNLNGRKSLANPGIAMATHKDDEERFFPQHGVLVFGRTNATNKTTLDNVLITDEEEIKATNPVATEEYGTVSSNLQSGSTNPTTETVNNQGILPGMVWQDRDVYLQGPIWAKIPHTDGHFHPSPLMGGFGLKHPPPQILIKNTPVPANPPETFATSKFASYITQYSTGQVSVEIEWELQKENSKRWNPEIQYTSNYAKSNNVEFSVDAAGVYSEPRPIGTRYLTRNL

SEQ ID NO: 31 - protein, 739 aa, Adeno-Associated Virus
  source 1..739: note = BCD_0167
MAADGYLPDWLEDNLSEGIREWLKLKAGAPQPKPNQQHQDNGRGLVLPGYKYLGPFNGLDKGEPVNEADAAALDHDKAYDKQLQAGDNPYLKYNHADAEFQERLEKDTSFGGNLGKAVFQAKKRVLEPFGLVEAPVKTAPGKKRPLEKTPNQPTDSEAAGQAPAKKKQHGEESGDPAKRRLSFSEKAPDQPPAPNPANPPSVGPATMASGGGSPVADNNEGADGVGNSSGNWHCDSTWLGDRVITTSTRTWALPTYNNHLYKQISSQNGATNDNHYFGYSTPWGYFDFNRFHCHFSPRDWQRLINNNWGFRPKRLSFKLFNIQVKEVTQTDGTTTIANNLTSTIQVFTDSEYQLPYVLGSAHEGCLPPFPADVFMIPQYGYLTLNNGSQAVGRSSFYCLEYFPSQMLRTGNNFSYSYVFEDVPFHSSYAHSQSLDRLMNPLIDQYLYYLSKTQGTNATVQGAKLQFSQAGPSNMRDQARNWMPGPCYRQQRLSKNAGDNSNSEYAWTAATKYHLNGRDSLVNPGPAMASHKDDEEKFFPMNGTLIFGKNGTGKSNVDIENVMITDEEEIRTTNPVATEQYGVVSDNLQSSNTRPVTGDVDSQGVLPGMVWQDRDVYLQGPIWAKIPHTDGHFHPSPLMGGFGLKHPPPQIMIKNTPVPANPATVFSPEKFASFITQYSTGQVSVEIEWELQKENSKRWNPEIQYTSNYNKSVNVDFTVDTNGVYSEPRPIGTRYLTRNL

SEQ ID NO: 32 - protein, 739 aa, Adeno-Associated Virus
  source 1..739: note = BCD_0168
MAADGYLPDWLEDNLSEGIREWLKLKAGAPQPKPNQQHQDNGRGLVLLGYKYLGPFNGLDRGEPANEADAAALDYDKAYDKQLQAGDNPYLKYNHADAEFQERLEKDTSFGGNLGKAVFQAKKRVLEPFGLVEAPVKTAPGKKRPLEKTPNQPTDSEAAGQAPAKKKQHGEESGDPAKRRLSFSEKAPDQPPAPNPANPPSVGPATMASGGGSPVADNNEGADGVGNSSGNWHCDSTWLGDRVITTSTRTWALPTYNNHLYKQISSQNGATNDNHYFGYSTPWGYFDFNRFHCHFSPRDWQRLINNNWGFRPKRLSFKLFNIQVKEVTQTDGTTTIANNLTSTIQVFTDSEYQLPYVLGSAHEGCLPPFPADVFMIPQYGYLTLNNGSQAVGRSSFYCLEYFPSQMLRTGNNFSYSYVFEDVPFHSSYAHSQSLDRLMNPLIDQYLYYLSKTQGTNATVQGAKLQFSQAGPSNMRDQARNWMPGPCYRQQRLSKNAGDNSNSEYAWTAATKYHLNGRDPLVNPGPAMASHKDDEEKFFPMNGTLIFGKNGTGKSNVDIENVMITDEEEIRTTNPVATEQYGVVSDNLQSSNTRPVTGDVDSQGVLPGMAWQDRDVYLQGPIWAKIPHTDGHFHPSPLMGGFGLKHPPPQIMIKNTPVPANPATVFSPEKFASFITQYSTGQVSVEIEWELQKENSKRWSPEIQYTSNYNKSVNVDFTVDTNGVYSEPRPIGTRYLTRNL

SEQ ID NO: 33 - protein, 739 aa, Adeno-Associated Virus
  source 1..739: note = BCD_0169
MAADGYLPDWLEDNLSEGIREWLKLKAGAPQPKPNQQHQDNGRGLVLPGYKYLGPFNGLDKGEPVNEADAAALDHDKAYDKQLQAGDNPYLKYNHADAEFQERLEKDTSFGGNLGKAVFQAKKRVLEPFGLVEAPVKAAPGKKRPLEKTPNQPTDSEAAGQAPAKKKQHGEESGDPAKRRLSFSEKAPDQPPAPNPANPPSVGPATMASGGGSPVADNNEGADGVGNSSGNWHCDSTWLGDRVTTTSTRTWALPTYNNHLYKQISSQNGATNDNHYFGYSTPWGYFDFNRFHCHFSPRDWQRLINNNWGFRPKRLSFKLFNILVKEVTQTDGTTTIANNLTSTIQVFTDSEYQLPYVLGSAHEGCLPPFPADVFMIPQYGYLTLNNGSQAVGRSSFYCLEYFPSQMLRTGNNFSYSYVFEDVPFHSSYAHSQSLDRLMNPLIDQYLYYLSKTQGTNATVQGARLQFFQAGPSNMRDQARNWMPGPCYRQQRLSKNAGDNSNSEYAWTAATKYHLNGRDSLVNPGPAMASHKDDEEKFFPMNGTLIFGKNGTGKSNVDIENVMITDVEEIRTTNPVATEQYGVVSDNLQSSNTRPVTGDVDSQGVLPGMVWQDRDVYLQGPIWAKIPHTDGHFHPSPLMGGFGLKHPPPQIMIKNTPVPANPATVFSPEKFASFITQYSTGQVSVEIEWELQKENSKRWNPEIQYTSNYNKSVNVDFTVNADGVYSEPRPIGTRYLTRNL

SEQ ID NO: 34 - protein, 739 aa, Adeno-Associated Virus
  source 1..739: note = BCD_0170
MAADGYLPDWLEDNLSEGIREWLKLKAGAPQPKPNQQHQDNGRGLVLPGYKYLGPFNGLDKGEPVNEADAAALDFDKAYDKQLQAGDNPYLKYNHADAEFQERLEKDTSFGGNLGKAVFQAKKRVLEPFGLVEAPVKTAPGKKRPLEKTPSQPTDSEAAGQAPAKKKQHGEESGDPAKRRLSFSEKAPDQPPAPNPANPPSVGPATMASGGGSPVADNNEGADGVGNSSGNWHCDSTWLGDRVITTSTRTWALPTYNNHLYKQISSQNGATNDNHYFGYSTPWGYFDFNRFHCHFSPRDWQRLINNNWGFRPKRLSFKLFNIQVKEVTQTDGTTTIANNLTSTIQVFTDSEYQLPYVLGSAHEGCLPPFPADVFMIPQYGYLTLNNGSQAVGRSSFYCLEYFPSQMLRTGNNFSYSYVFEDVPFHSSYAHSQSLDRLMNPLIDQYLYYLSKTQGTNATVQGAKLQFSQAGPSNMRDQARNWMPGPCYRQQRLSKNAGDNSNSEYAWTAATKYHLNGRDSLVNPGPAMASHKDDEEKFFPMNGTLIFGKNGTGKSNVDIENVMITDEEEIRTTNPVATEQYGVVSDNLQSSNTRPVTGDVDSQGVLPGMVWQDRDVYLQGPIWAKIPHTDGHFHPSPLMGGFGLKHPPPQIMIKNTPVPANPATVFSPEKSASFITQYSTGQVSVEIEWELQKENSKRWNPEIQYTSNYNKSVNVDFTVDTNGVYSEPRPIGTRYLTRNL

SEQ ID NO: 35 - protein, 739 aa, Adeno-Associated Virus
  source 1..739: note = BCD_0171
MAADGYLPDWLEDNLSEGIREWLKLKAGAPQPKPNQQHQDNGRGLVLPGYKYLGPFNGLDKGEPVNEADAAALDHDKAYDKQLQAGDNPYLKYNHADAEFQERLEKDTSFGGNLGKAVFQAKKRVLEPFGLVEAPVKTAPGKKRPLEKTPIQPTDSEAAGQAPAKKKQHGEESGDPAKRRLSFSEKAPDQPPAPNPANPPSVGPATMASGGGSPVADNNEGADGVGNSSGNWHCDPTWLGDRVITTSTRTWALPTHNNHLYKQISSQNGATNDNHYFGYSTPWGYFDFNRFHCHFSPRDWQRLINNNWGFRPKRLSFKPFNIQVKEVTQTDGTTTIANNLTSTIQVFTDSEYQLPYVLGSAHEGCLPPFPADVFMIPQYGYLTLNNGSQAVGRSSFYCLEYFPSQMLRTGNNFSYSYVFEDVPFHSSYAHSQSLGRLMNPLIDQYLYYLSKTQGTNATVQGAKLQFSQAGPSNMRDQARNWMPGPCYRQQRLSKNAGDNSNSEYAWTAATKYHLNGRDSLVNPGPAMASHKDDEEKFFPMNGTLIFGKNGTGKSNVDIENVMITDEEEIRTTNPVATEQYGVVSDNLQSSNTRPVTGDVDSQGVLPGMVWQDRDVYLQGPIWAKIPHTDGHFHPSPLMGGFGLKHPPPQIMIKNTPVPANPATVFSPEKFASFITQYSTGQVSVEIEWELQKENSKRWNPEIQYTSNYNKSVNVDFTVNADGVYSEPRPIGTRYLTRNL

SEQ ID NO: 36 - protein, 739 aa, Adeno-Associated Virus
  source 1..739: note = BCD_0172
MAADGYLPDWLEDNLSEGIREWLKLKAGAPQPKPNQQHQDNGRGLVLPGYKYLGPFNGLDKGEPVNEADAAALDYDKAYDKQLQAGDNPYLKYNHADAEFQERLEKDTSFGGNLGKAVFQAKKRVLEPFGLVEAPVKTAPGKKRPLEKTPNQPTDSEAAGQAPAKKKQHGEESGDPAKRRLSFSEKAPDQPPAPNPANPPSVGPATMASGGGSPVADNNEGADGVGNSSGNWHCDSTWLGDRVITTSTRTWALPTYNNHLYKQISSQNGATNDNHYFGYSTPWGYFDFNRLHCHFSPRDWQRLINNNWGFRPKRLSFKLFNIQVKEVTQTDGTTTIANNLTSTIQVFTDSEYQLPYVLGSAHEGCLPPFPADVFMIPQYGYLTLNNGSQAVGRSSFYCLEYFPSQMLRTGNNFSYSYVFEDVPFHSSYAHSQSLDRLMNPLIDQYLYYLSKTQGTNATVQGAKLQFSQAGPSNMRDQARNWMPGPCYRQQRLSKNAGDNSNSEYAWTAATKYHLNGRDSLVNPGPAMASHKDDEEKFFPMNGTLIFGKNGTGKSNVDIENVMITDEEEIRTTNPVATEQYGVVSDNLQSSNTRPVTGDVDSQGVLPGMVWQDRDVYLQGPIWAKIPHTDGHFHPSPLMGGFGPKHPPPQIMIKNTPVPANPATVFSPEKFASFITQYSTGQVSVEIEWEPQKENSKRWNPEIQYTSNYNKSVNVDFTVDTNGVYSEPRPIGTRYLTRNL

SEQ ID NO: 37 - protein, 739 aa, Adeno-Associated Virus
  source 1..739: note = BCD_0174
MAADGYLPDWLEDNLSEGIREWWALKPGAPQPKANQQHQDNSRGLVLPGYKYLGPFNGLDKGEPVNEADAAALEHDKAYDKQLEQGDNPYLKYNHADAEFQERLQEDTSFGGNLGRAVFQAKKRILEPLGLVEEAAKTAPGKKRPLEKTPNQPTDTQAAGQTPAKKRPQGEQSGDSARRQLDFDPQPAAPIGQPPAAPSPVGSNTMASGGGGPMADDNQGADGVGNASGNWHCDSTWLGDRVITTSTRTWVLPTYNNHIYKQISSESGATNDNHYFGYSTPWGYFDFNRFHCHFSPRDWQRLINNNWGFRPKRLNFKIFNIQVKEVTQIEGGSTIANNLTSTIQVFADSEYQLPYVLGSAHQGCLPPFPADVFMIPQYGYLTLNNGSQSVGRSSFYCLEYFPSQMLRTGNNFQFSYTFESVPFHSSYAHSQSLDRIMNPLVDQYLYYLARTQTGTGSTTSNTRQLQFYQAGPSNMADQSRNWLPGPMYRQQRVSKTLDQNSNTNFAWTAASKYNLNGRKSLANPGIAMATHKDDEERFFPQHGVLVFGRTNATNKTTLDNVLITDEEEIKATNPVATEEYGTVSSNLQSGSTNPTTETVNNQGILPGMVWQDRDVYLQGPIWAKIPHTDGHFHPSPLMGGFGLKHPPPQILIKNTPVPANPPETFTTSKFASYITQYSTGQVSVEIEWELQKENSKRWNPEIQYTSNYAKSNNVEFSVDAAGVYSEPRPIGTRYLTRNL

SEQ ID NO: 38 - protein, 739 aa, Adeno-Associated Virus
  source 1..739: note = BCD_0175
MAADGYLPDWLEDNLSEGIREWWALKPGAPQPKANQQHQDNSRGLVLPWYKYLGPFNGLDKGEPVNEADAAALEHDKAYDKQLEQGDNPYLKYNHADAEFQERLQEDTSFGGNLGRAVFQAKKRILEPLGLVEEAAKTAPGKKRPLEKTPNQPTDTQAAGQTPAKKRPQGEQSGDSARRQLDFDPQPAAPIGQPPAAPSPVGSNTMASGGGGPMADDNQGADGVGNASGNWHCDSTWLGDRVITTSTRTWVLPTYNNHIYKQISSESGATNDNHYFGYSTPWGYSDFNRFHCHFSPRDWQRLINNNWGFRPKRLNFKIFNIQVKEVTQIEGGSTIANNLTSTIQVFADSEYQLPYVLGSAHQGCLPPFPADVFMIPQYGYLTLNNGSQSVGRSSFYCLEYFPSQMLRTGNNFQFSYTFESVPFHSSYAHSQSLDRIMNPLVDQYLYYLARTQTGTGSTTSNTRQLQFYQAGPSNMADQSRNWLPGPMYRQQRVSKTLDQNSNTNFAWTAASKYNLNGRKSLANPGIAMATHKDDEERFFPQHGVLVFGRTNATNKTTLDNVLITDEEEIKATNPVATEEYGTVSSNLQSGSTNPTTETVNNQGILPGMVWQDRDVYLQGPIWAKIPHTDGHFHPSPLMGGFGLKHPPPQILIKNTPVPANPPETFTTSKFASYITQYSTGQVSVEIEWELQKENSKRWNPEIQYTSNYAKSNNVEFSVDAAGVYSEPRPIGTRYLTRNL

SEQ ID NO: 39 - protein, 737 aa, Adeno-Associated Virus
  source 1..737: note = BCD_0176
MAADGYLPDWLEDNLSEGIREWWDLKPGAPKPKANQQKQDDGRGLVLPGYKYLGPFNGLDKGEPVNAADAAALEHDKAYDQQLKAGDNPYLRYNHADAEFQERLQEDTSFGGNLGRAVFQAKKRVLEPLGLVESPVKTAPGKKRPVEPSPQRSPDSSTGIGKKGQQPAKKRLNFGQTGDSESVPDPQPIGEPPAGPSGLGSGTMAAGGGAPMADNNEGADGVGNASGNWHCDSTWLGDRVITTSTRTWALPTYNNHLYKQISSQSAGSTNDNVYFGYSTPWGYFDFNRFHCHFSPRDWQRLINNNWGFRPKKLNFKLFNIQVKEVTTNDGVTTIANNLTSTVQVFSDSEYQLPYVLGSAHQGCLPPFPADVFMIPQYGYLTLNNGSQSVGRSSFYCLEYFPSQMLRTGNNFTFSYTFEDVPFHSSYAHSQSLDRLMNPLIDQYLYYLARTQSNAGGTAGNRELQFYQGGPTTMAEQAKNWLPGPCFRQKRVSKTLDQNNNSNFAWTGATKYHLNGRNSLVNPGIAMATHKDDEERFFPSSGVLIFGKTGATNKTTLENVLMTNEEEIRPTNPVATEEYGIVSSNLQASSTAAQTQVVNNQGALPGMVWQNRDVYLQGPIWAKIPHTDGNFHPSPLMGGFGLKHPPPQILIKNTPVPANPPEVFTPAKFASFITQYSTGQVSVEIEWELQKENSKRWNPEIQYTSNFDKQTGVDFAVDSQGVYSEPRPIGTRYLTRNL

SEQ ID NO: 40 - protein, 738 aa, Adeno-Associated Virus
  source 1..738: note = BCD_0177
MAADGYLPDWLEDNLSEGIREWWDLKPGAPKPKANQQKQDDGRGLVLPGYKYLGPFNGLDKGEPVNAADAAALEHDKAYDQQLQAGDNPYLRYNHADAEFQERLQEDTSFGGNLGRAVFQAKKRVLEPLGLVESPVKTAPGKKRPVEPSPQRSPDSSTGIGKKGQQPAKKRLNFGQTGDSESVPDPQPIGEPPAGPSGLGSGTMAAGGGAPMADNNEGADGVGSSSGNWHCDSTWLGDRVITTSTRTWALPTYNNHLYKQISNGTSGGSTNDNTYFGYSTPWGYFDFNRFHCHFSPRDWQRLINNNWGFRPKRLNFKLFNIQVKEVTQNEGTKTIANNLTSTIQVFTDSEYQLPYVLGSAHQGCLPPFPADVFMIPQYGYLTLNNGSQAVGRSSFYCLEYFPSQMLRTGNNFEFSYQFEDVPFHSSYAHSQSLDRLMNPLIDQYLYYLSRTQSTGGTTGTQQLLFSQAGPNNMSAQAKNWLPGPCYRQQRVSTTTNQNNNSNFAWTGATKYHLNGRDSLVNPGVAMATHKDDEERFFPSSGVLMFGKQGAGKDNVDYSSVMLTSEEEIKTTNPVATEQYGVVADNLQQQNAAPIVGAVNSQGALPGMVWQNRDVYLQGPIWAKIPHTDGNFHPSPLMGGFGLKHPPPQILIKNTPVPADPPTTFNQAKLASFITQYSTGQVSVEIEWELQKENSKRWNPEIQYTSNYYKSTNVDFAVNTEGTYSEPRPIGTRYLTRNL

SEQ ID NO: 41 - protein, 728 aa, Adeno-Associated Virus
  source 1..728: note = BCD_0178
MAADGYLPDWLEDNLSEGIREWWDLKPGAPKPKANQQKQDDGRGLVLPGYKYLGPFNGLDKGEPVNAADAAALEHDKAYDQQLKAGDNPYLRYNHADAEFQERLQEDTSFGGNLGRAVFQAKKRVLEPLGLVEEGAKTAPGKKRPVESPDSSTGIGKKGQQPAKKRLNFGQTGDSESVPDPQPLGEPPAAPSGLGPTTMASGGGAPMADNNEGADGVGNASGNWHCDSTWLGDRVITTSTRTWALPTYNNHLYKQISSQSGATNDNHFFGYSTPWGYFDFNRFHCHFSPRDWQRLINNNWGFRPRKLRFKLFNIQVKEVTTNDGVTTIANNLTSTIQVFSDSEYQLPYVLGSAHQGCLPPFPADVFMIPQYGYLTLNNGSQSVGRSSFYCLEYFPSQMLRTGNNFEFSYTFEEVPFHSSYAHSQSLDRLMNPLIDQYLYYLARTQSTTGSARELQFHQAGPNTMAEQSKNWLPGPCYRQQRLSKNIDSNNNSNFAWTGATKYHLNGRNSLTNPGVAMATNKDDEDQFFPINGVLVFGKTGAANKTTLENVLMTSEEEIKTTNPVATEEYGVVSSNLQSSTAGPQTQTINSQGALPGMVWQNRDVYLQGPIWAKIPHTDGNFHPSPLMGGFGLKHPPPQILIKNTPVPANPPEVFTPAKFASFITQYSTGQVSVEIEWELQKENSKRWNPEIQYTSNYAKSNNVEFAVNNEGVYTEPRPIGTRYLTRNL

SEQ ID NO: 42 - protein, 737 aa, Adeno-Associated Virus
  source 1..737: note = BCD_0179
MAADGYLPDWLEDNLSEGIREWWDLKPGAPKPKANQQKQDDGRGLVLPGYKYLGPFNGLDKGEPVNAADAAALEHDKAYDQQLQAGDNPYLRYNHADAEFQERLQEDTSFGGNLGRAVFQAKKRVLEPLGLVESPVKTAPGKKRPVEPSPQRSPDSSTGIGKKGQQPAKKRLNFGQTGDSESVPDPQPIGEPPAGPSGLGSGTMAAGGGAPMADNNEGADGVGNASGNWHCDSTWLGDRVITTSTRTWALPTYNNHLYKQISSQSAGSTNDNVYFGYSTPWGYFDFNRFHCHFSPRDWQRLINNNWGFRPKKLNFKLFNIQVKEVTTNDGVTTIANNLTSTVQVFSDSEYQLPYVLGSAHQGCLPPFPADVFMIPQYGYLTLNNGSQSVGRSSFYCLEYFPSQMLRTGNNFTFSYTFEDVPFHSSYAHSQSLDRLMNPLIDQYLYYLARTQSNAGGTAGNRELQFYQGGPTTMAEQAKNWLPGPCFRQQRVSKTLDQNNNSNFAWTGATKYHLNGRNSLVNPGIAMATHKDDEERFFPSSGVLIFGKTGATNKTTLENVLMTNEEEIRPTNPVATEEYGIVSSNLQASSTAAQTQVVNNQGALPGMVWQNRDVYLQGPIWAKIPHTDGNFHPSPLMGGFGLKHPPPQILIKNTPVPANPPEVFTPAKFASFITQYSTGQVSVEIEWELQKENSKRWNPEIQYTSNFDKQTGVDFAVDSQGVYSEPRPIGTRYLTRNL

SEQ ID NO: 43 - protein, 736 aa, Adeno-Associated Virus
  source 1..736: note = BCD_0180
MAADGYLPDWLEDNLSEGIREWWDLKPGAPKPKANQQKQDNGRGLVLPGYKYLGPFNGLDKGEPVNAADAAALEHDKAYDQQLKAGDNPYLRYNHADAEFQERLQEDTSFGGNLGRAVFQAKKRVLEPLGLVEEGAKTAPGKKRPVEQSPQEPDSSSGIGKTGQQPAKKRLNFGQTGDSESVPDPQPLGEPPAAPSGLGPNTMASGGGAPMADNNEGADGVGNSSGNWHCDSTWLGDRVITTSTRTWALPTYNNHLYKQISNGTSGGSTNDNTYFGYSTPWGYFDFNRFHCHFSPRDWQRLINNNWGFRPKRLNFKLFNIQVKEVTTNEGTKTIANNLTSTVQVFTDSEYQLPYVLGSAHQGCLPPFPADVFMVPQYGYLTLNNGSQALGRSSFYCLEYFPSQMLRTGNNFQFSYTFEDVPFHSSYAHSQSLDRLMNPLIDQYLYYLVRTQTTGTGGTQTLAFSQAGPSSMANQARNWVPGPSYRQQRVSTTTNQNNNSNFAWTGAAKFKLNGRDSLMNPGVAMASHKDDDDRFFPSSGVLIFGKQGAGNDGVDYSQVLITDEEEIKATNPVATEEYGAVAINNQAANTQAQTGLVHNQGVIPGMVWQNRDVYLQGPIWAKIPHTDGNFHPSPLMGGFGLKHPPPQILIKNTPVPADPPLTFNQAKLNSFITQYSTGQVSVEIEWELQKENSKRWNPEIQYTSNYYKSTSVDFAVNTEGVYSEPRPIGTRYLTRNL

SEQ ID NO: 44 - protein, 738 aa, Adeno-Associated Virus
  source 1..738: note = BCD_0181
MAADGYLPDWLEDNLSEGIREWWDLKPGAPKPKANQQKQDDGRGLVLPGYKYLGPFNGLDKGEPVNAADAAALEHDKAYDQQLKAGDNPYLRYNHADAEFQERLQEDTSFGGNLGRAVFQAKKRVLEPLGLVETPAKTAPGKKRPVEPSPQRSPDSSTGIGKKGQQPAKKRLNFGQTGDSESVPDPQPIGEPPAGPSGLGSGTMAAGGGAPMADNNEGADGVGSSSGNWHCDSTWLGDRVITTSTRTWALPTYNNHLYKQISNGTSGGSTNDNTYFGYSTPWGYFDFNRFHCHFSPRDWQRLINNNWGFRPKRLNFKLFNIQVKEVTQNEGTKTIANNLTSTIQVFTDSEYQLPYVLGSAHQGCLPPFPADVFMIPQYGYLTLNNGSQAVGRSSFYCLEYFPSQMLRTGNNFTFSYTFEDVPFHSSYAHSQSLDRLMNPLVDQYLYYLSRTQSTGGTAGTQQLLFSQAGPNNMSAQAKNWLPGPCYRQQRVSTTLSQNNNSNFAWTGATKYHLNGRDSLVNPGVAMATHKDDEERFFPSSGVLMFGKQGAGKDNVDYSSVMLTSEEEIKTTNPVATEQYGVVADNLQQQNAAPIVGAVNSQGALPGMVWQNRDVYLQGPIWAKIPHTDGNFHPSPLMGGFGLKHPPPQILIKNTPVPADPPTTFSQAKLASFITQYSTGQVSVEIEWELQKENSKRWNPEIQYTSNYYKSTNVDFAVNTDGTYSEPRPIGTRYLTRNL

SEQ ID NO: 45 - protein, 736 aa, Adeno-Associated Virus
  source 1..736: note = BCD_0182
MAADGYLPDWLEDNLSEGIREWWDLKPGAPKPKANQQKQDDGRGLVLPGYKYLGPFNGLDKGEPVNAADAAALQHDKAYDQQLKAGDNPYLRYNHADAEFQERLQEDTSFGGNLGRAVFQAKKRVLEPLGLVEEGAKTAPGKKRPVEQSPQEPDSSSGIGKTGQQPAKKRLNFGQTGDSESVPDPQPLGEPPAAPSGLGPNTMASGGGAPMADNNEGADGVGNSSGNWHCDSTWLGDRVITTSTRTWALPTYNNHLYKQISNGTSGGSTNDNTYFGYSTPWGYFDFNRFHCHFSPRDWQRLINNNWGFRPKRLNFKLFNIQVKEVTTNEGTKTIANNLTSTVQVFTDSEYQLPYVLGSAHQGCLPPFPADVFMVPQYGYLTLNNGSQALGRSSFYCLEYFPSQMLRTGNNFQFSYTFEDVPFHSSYAHSQSLDRLMNPLIDQYLYYLVRTQTTGTGGTQTLAFSQAGPSSMANQARNWVPGPCYRQQRVSTTTNQNNNSNFAWTGAAKFKLNGRDSLMNPGVAMASHKDDDDRFFPSSGVLIFGKQGAGNDGVDYSQVLITDEEEIKATNPVATEEYGAVAINNQAANTQAQTGLVHNQGVIPGMVWQNRDVYLQGPIWAKIPHTDGNFHPSPLMGGFGLKHPPPQILIKNTPVPADPPLTFNQAKLNSFITQYSTGQVSVEIEWELQKENSKRWNPEIQYTSNYYKSTNVDFAVNTEGVYSEPRPIGTRYLTRNL

SEQ ID NO: 46 - protein, 736 aa, Adeno-Associated Virus
  source 1..736: note = BCD_0185
MAADGYLPDWLEDNLSEGIREWWDLKPGAPKPKANQQKQDDGRGLVLPGYKYLGPFNGLDKGEPVNAADAAALEHDKAYDQQLKAGDNPYLRYNHADAEFQERLQEDTSFGGNLGRAVFQAKKRVLEPLGLVEEGAKTAPGKKRPVEQSPQEPDSSSGIGKTGQQPAKKRLNFGQTGDSESVPDPQPLGEPPAAPSGLGPNTMASGGGAPMADNNEGADGVGNSSGNWHCDSTWLGDRVITTSTRTWALPTYNNHLYKQISNGTSGGSTNDNTYFGYSTPWGYFDFNRFHCHFSPRDWQRLINNNWGFRPKRLNFKLFNIQVKEVTTNEGTKTIANNLTSTVQVFTDSEYQLPYVLGSAHQGCLPPFPADVFMVPQYGYLTLNNGSQALGRSSFYCLEYFPSQMLRTGNNFQFSYTFEDVPFHSSYAHSQSLDRLMNPLIDQYLYYLVRTQTTGTGGTQTLAFSQAGPSSMANQARNWVPGPCYRQQRVSTTTNQNNNSNFAWTGAAKFKLNGRDSLMNPGVAMASHKDDEDRFFPSSGVLIFGKQGAGNDGVDYSQVLITDEEEIKATNPVATEEYGAVAINNQAANTQAQTGLVHNQGVIPGMVWQNRDVYLQGPIWAKIPHTDGNFHPSPLMGGFGLKHPPPQILIKNTPVPADPPLTFNQAKLNSFITQYSTGQVSVEIEWELQKENSKRWNPEIQYTSNYYKSTNVDFAVNTEGVYSEPRPIGTRYLTRNL

SEQ ID NO: 47 - protein, 738 aa, Adeno-Associated Virus
  source 1..738: note = BCD_0186
MAADGYLPDWLEDNLSEGIREWWDLKPGAPKPKANQQKQDDGRGLVLPGYKYLGPFNGLDKGEPVNAADAAALEHDKAYDQQLKAGDNPYLRYNHADAEFQERLQEDTSFGGNLGRAVFQAKKRVLEPLGLVEEGAKTAPGKKRPVEPSPQRSPDSSTGIGKKGQQPARKRLNFGQIGDSESVPDPQPLGEPPAAPSSVGSGTMAAGGGAPMADNNEGADGVGSSSGNWHCDSTWLGDRVITTSTRTWALPTYNNHLYKQISNGTSGGSTNDNTYFGYSTPWGYFDFNRFHCHFSPRDWQRLINNNWGFRPKRLSFKLFNIQVKEVTQNEGTKTIANNLTSTIQVFTDSEYQLPYVLGSAHQGCLPPFPADVFMIPQYGYLTLNNGSQAVGRSSFYCLEYFPSQMLRTGNNFSFSYTFEDVPFHSSYAHSQSLDRLMNPLIDQYLYYLSRTQSTGGTAGTQQLLFSQAGPSNMSAQARNWLPGPCYRQQRVSTTLSQNNNSNFAWTGATKYHLNGRDSLVNPGVAMATNKDDEDRFFPSSGILMFGKQGAGKDNVDYSNVMLTSEEEIKTTNPVATEQYGVVADNLQQQNTAPIVGAVNSQGALPGMVWQNRDVYLQGPIWAKIPHTDGNFHPSPLMGGFGLKHPPPQILIKNTPVPADPPTAFNQAKLNSFITQYSTGQVSVEIEWELQKENSKRWNPEIQYTSNYYKSTNVDFAVNTEGVYSEPRPIGTRYLTRNL

SEQ ID NO: 48 - protein, 738 aa, Adeno-Associated Virus
  source 1..738: note = BCD_0187
MAADGYLPDWLEDNLSEGIREWWDLKPGAPKPKANQQKQDDGRGLVLPGYKYLGPFNGLDKGEPVNAADAAALEHDKAYDQQLKAGDNPYLRYNHADAEFQERLQEDTSFGGNLGRAVFQAKKRVLEPLGLVEEGAKTAPGKKRPVEPSPQRSPDSSTGIGKKGQQPARKRLNFGQTGDSESVPDPQPLGEPPAAPSSVGSGTMAAGGGAPMADNNEGADGVGSSSGNWHCDSTWLGDRVITTSTRTWALPTYNNHLYKQISNGTSGGSTNDNTYFGYSTPWGYFDFNRFHCHFSPRDWQRLINNNWGFRPKRLSFKLFNIQVKEVTQNEGTKTIANNLTSTIQVFTDSEYQLPYVLGSAHQGCLPPFPADVFMIPQYGYLTLNNGSQAVGRSSFYCLEYFPSQMLRTGNNFSFSYTFEDVPFHSSYAHSQSLDRLMNPLIDQYLYYLSRTQSTGGTAGTQQLLFSQAGPSNMSAQARNWLPGPCYRQQRVSTTLSQNNNSNFAWTGATKYHLNGRDSLVNPGVAMATNKDDEDRFFPSSGILMFGKQGAGKDNVDYSNVMLTSEEEIKTTNPVATEQYGVVADNLQQQNTAPIVGAVNSQGALPGMVWQNRDVYLQGPIWAKIPHTDGNFHPSPLMGGFGLKHPPPQILIKNTPVPADPPTAFNQAKLNSFITQYSTGQVSVEIEWELQKENSKRWNPEIQYTSNYYKSTNVDFAVNTEGVYSEPRPIGTRYLTRNL

SEQ ID NO: 49 - protein, 737 aa, Adeno-Associated Virus
  source 1..737: note = BCD_0188
MAADGYLPDWLEDNLSEGIREWWDLKPGAPKPKANQQKQDDGRGLVLPGYKYLGPFNGLDKGEPVNAADAAALEHDKAYDQQLKAGDNPYLRYNHADAEFQERLQEDTSFGGNLGRAVFQAKKRVLEPLGLVEEGAKTAPAKKRPVEPSPQRSPDSSTGIGKKGQQPARKRLNFGQTGDSESVPDPQPLGEPPAAPSSVGSGTVAAGGGAPMADNNEGADGVGNASGNWHCDSTWLGDRVITTSTRTWALPTYNNHLYKQISSETAGSTNDNTYFGYSTPWGYFDFNRFHCHFSPRDWQRLINNNWGFRPKKLRFKLFNIQVKEVTTNDGVTTIANNLTSTIQVFSDSEYQLPYVLGSAHQGCLPPFPADVFMIPQYGYLTLNNGSQSVGRSSFYCLEYFPSQMLRTGNNFEFSYSFEDVPFHSSYAHSQSLDRLMNPLIDQYLYYLARTQSNPGGTAGTRELQFYQGGPSTMAEQAKNWLPGPCFRQQRVSKTLDQNNNSNFAWTGATKYHLNGRNSLVNPGVAMATHKDDEDRFFPSSGVLIFGKTGATNKTTLENVLMTNEEEIRPTNPVATEEYGIVSSNLQAANTAAQTQVVNNQGALPGMVWQNRDVYLQGPIWAKIPHTDGNFHPSPLMGGFGLKHPPPQILIKNTPVPANPPEVFTPAKFASFITQYSTGQVSVEIEWELQKENSKRWNPEIQYTSNFEKQTGVDFAVDSQGVYSEPRPIGTRYLTRNL

SEQ ID NO: 50 - protein, 729 aa, Adeno-Associated Virus
  source 1..729: note = BCD_0189
MAADGYLPDWLEDNLSEGIREWWALKPGAPKPKANQQKQDDGRGLVLPGYKYLGPFNGLDKGEPVNAADAAALEHDKAYDQQLKAGDNPYLRYNHADAEFQERLQEDTSFGGNLGRAVFQAKKRVLEPLGLVEEGAKTAPGKKRPIDSPDSSTGIGKKGQQPAKKKLNFGQTGDSESVPDPQPLGEPPAAPSSVGSGTMAAGGGAPMADNNEGADGVGNASGNWHCDSTWLGDRVITTSTRTWALPTYNNHLYKQISSSSSGATNDNHYFGYSTPWGYFDFNRFHCHFSPRDWQRLINNNWGFRPKKLRFKLFNIQVKEVTTNDGVTTIANNLTSTVQVFSDSEYQLPYVLGSAHQGCLPPFPADVFMIPQYGYLTLNNGSQSVGRSSFYCLEYFPSQMLRTGNNFEFSYSFEDVPFHSSYAHSQSLDRLMNPLIDQYLYYLARTQSTTGSTRELQFHQAGPNTMAEQSKNWLPGPCYRQQRLSKNLDFNNNSNFAWTAATKYHLNGRNSLTNPGIPMATNKDDEDQFFPINGVLVFGKTGAANKTTLENVLMTSEEEIKTTNPVATEEYGVVSSNLQSSTAGPQSQTINSQGALPGMVWQNRDVYLQGPIWAKIPHTDGNFHPSPLMGGFGLKHPPPQILIKNTPVPANPPEVFTPAKFASFITQYSTGQVSVEIEWELQKENSKRWNPEIQYTSNYAKSNNVEFAVNPDGVYTEPRPIGTRYLTRNL

SEQ ID NO: 51 - protein, 739 aa, Adeno-Associated Virus
  source 1..739: note = BCD_0190
MAADGYLPDWLEDNLSEGIREWWDLKPGAPKPKANQQKQDDGRGLVLPGYKYLGPFNGLDKGEPVNAADAAALEHDKAYDQQLKAGDNPYLRYNHADAEFQERLQEDTSFGGNLGRAVFQAKKRVLEPLGLVEEGAKTAPGKKRPLEKTPNQPTDTQAAGQTPAKKRPQGEQSGDSARRQLDFDPQPAAPLGQPPAAPSPVGSNTMASGGGGPMADDNQGADGVGNASGNWHCDSTWLGDRVITTSTRTWVLPTYNNHIYKQISSETGATNDNHYFGYSTPWGYFDFNRFHCHFSPRDWQRLINNNWGFRPKRLNFKIFNIQVKEVTQIEGGSTIANNLTSTIQVFADSEYQLPYVLGSAHQGCLPPFPADVFMIPQYGYLTLNNGSQSVGRSSFYCLEYFPSQMLRTGNNFSFSYTFESVPFHSSYAHSQSLDRIMNPLVDQYLYYLARTQTGTGSTTSNTRQLQFYQAGPSNMADQSRNWLPGPTYRQQRVSKTLDQNSNTNFAWTAASKYNLNGRKSLTNPGIAMATHKDDEERFFPQHGVLVFGKTNATNKTTLENVLVTSEEEIKATNPVATEEYGTVSSNLQSNTTNPTTESVNNQGVLPGMVWQDRDVYLQGPIWAKIPHTDGHFHPSPLMGGFGLKHPPPQILIKNTPVPANPPETFTTSKFASYITQYSTGQVSVEIEWELQKENSKRWNPEIQYTSNYAKSNNVEFSVDAAGVYSEPRPIGTRYLTRNL

SEQ ID NO: 52 - protein, 739 aa, Adeno-Associated Virus
  source 1..739: note = BCD_0192
MAADGYLPDWLEDNLSEGIREWWDLKPGAPKPKANQQKQDDGRGLVLPGYKYLGPFNGLDKGEPVNAADAAALEHDKAYDQQLKAGDNPYLRYNHADAEFQERLQEDTSFGGNLGRAVFQAKKRVLEPLGLVEEGAKTAPGKKRPLEKTPNQPTDTQAAGQTPAKKRPQGEQSGDSARRQLDFDPQPAAPLGQPPAAPSPVGSNTMASGGGGPMADDNQGADGVGNASGNWHCDSTWLGDRVITTSTRTWVLPTYNNHIYKQISSETGATNDNHYFGYSTPWGYFDFNRFHCHFSPRDWQRLINNNWGFRPKRLNFKIFNIQVKEVTQIEGGSTIANNLTSTIQVFADSEYQLPYVLGSAHQGCLPPFPADVFMIPQYGYLTLNNGSQSVGRSSFYCLEYFPSQMLRTGNNFSFSYTFESVPFHSSYAHSQSLDRIMNPLVDQYLYYLARTQTGTGSTTSNARQLQFYQAGPSNMADQSRNWLPGPTYRQQRVSKTLDQNSNTNFAWTAASKYNLNGRKSLTNPGIAMATHKDDEERFFPQHGVLVFGKTNATNKTTLENVLVTSEEEIKATNPVATEEYGTVSSNLQSNTTNPTTESVNNQGVLPGMVWQDRDVYLQGPIWAKIPHTDGHFHPSPLMGGFGLKHPPPQILIKNTPVPANPPETFTTSKFASYITQYSTGQVSVEIEWELQKENSKRWNPEIQYTSNYAKSNNVEFSVDAAGVYSEPRPIGTRYLTRNL

SEQ ID NO: 53 - protein, 734 aa, Adeno-Associated Virus
  source 1..734: note = BCD_0193
MAADGYLPDWLEDNLSEGIREWWDLKPGAPKPKANQQKQDHGRGLVLPGYKYLGPFNGLDKGEPVNEADAAALEHDKAYDQQLKAGDNPYLRYNHADAEFQERLQEDTSFGGNLGRAVFQAKKRILEPLGLVEEGAKTAPGKKRPVEQSPQEPDSSSGIGKTGQQPAKKRLNFGQTGDSESVPDPQPIGEPPAAPSGLGSNTMASGGGAPMADNNEGADGVGNSSGNWHCDSTWLGDRVITTSTRTWALPTYNNHLYKQISNGTSGGSTNDNTYFGYSTPWGYFDFNRFHCHFSPRDWQRLINNNWGFRPKKLNFKLFNIQVKEVTTNEGTKTIANNLTSTVQVFTDSEYQLPYVLGSAHQGCLPPFPADVFMVPQYGYLTLNNGSQALGRSSFYCLEYFPSQMLRTGNNFQFSYTFEDVPFHSSYAHSQSLDRLMNPLIDQYLYYLVRTQTTGTGGTQTLAFSQGGPSTMANQARNWVPGPCYRQQRVSTTQNQNNNSNFAWTGAAKFKLNGRDSLMNPGVAMASHKDDEDRFFPSSGVLIFGKQGANKDGADYSQVLITDEEEIKATNPVATEEYGVVAINQQNANTQAQTGAVHNQGVIPGMVWQNRDVYLQGPIWAKIPHTDGNFHPSPLMGGFGLKHPPPQILIKNTPVPADPPLTFTEAKLNSFITQYSTGQVSVEIEWELQKENSKRWNPEIQYTSNYYKSTSVDFAVNTEGVYSEPRPIGTRYLTR

SEQ ID NO: 54 - protein, 730 aa, Adeno-Associated Virus
  source 1..730: note = BCD_0194
MAADGYLPDWLEDNLSEGIREWWALKPGAPQPKANQQKQDDGRGLVLPGYKYLGPFNGLDKGEPVNEADAAALEHDKAYDQQLKAGDNPYLRYNHADAEFQERLQEDTSFGGNLGRAVFQAKKRVLEPLGLVEEAAKTAPGKKRPVDSPDSTSGIGKKGQQPARKRLNFGQTGDAESVPDPQPIGEPPAAPSGLGSGTMAAGGGAPMADNNEGADGVGNASGNWHCDSTWLGNRVITTSTRTWALPTYNNHLYKQISSSSSGATNDNHYFGYSTPWGYFDFNRFHCHFSPRDWQRLINNNWGFRPKRLRFKLFNIQVKEVTTNDGVTTIANNLTSTVQVFSDSEYQLPYVLGSAHQGCLPPFPADVFMIPQYGYLTLNNGSQSVGRSSFYCLEYFPSQMLRTGNNFEFSYEFEDVPFHSSYAHSQSLDRLMNPLIDQYLYYLARTQSSTGTSTRELQFHQAGPATMAEQSKNWLPGPCFRQQRISKTTDNNNNSNFAWTGATKYHLNGRNSLTNPGVPMATHKDDESVFFPINGVLVFGKTGASNKTTLENVLMTDEEEIKATNPVATEEYGVVSSNIQSQNSNPTTQTVNNQGALPGMVWQNRDVYLQGPIWAKIPHTDGNFHPSPLMGGFGLKHPPPQILIKNTPVPANPPETFTPAKFASFITQYSTGQVSVEIEWELQKENSKRWNPEIQYTSNYDKQTGVDFAVDTQGVYSEPRPIGTRYLTRNL

SEQ ID NO: 55 - protein, 736 aa, Adeno-Associated Virus
  source 1..736: note = BCD_0195
MAADGYLPDWLEDNLSEGIREWWDLKPGAPKPKANQQKQDHGRGLVLPGYKYLGPFNGLDKGEPVNEADAAALEHDKAYDQQLKAGDNPYLRYNHADAEFQERLKEDTSFGGNLGRAVFQAKKRILEPLGLVEEGAKTAPGKKRPVEQSPQEPDSSSGIGKTGQQPAKKKFNFGQTGDPESVPDPQPIGEPPAAPSGLGSNTMASGGGAPMADNNEGADGVGNSSGNWHCDSTWLGDRVITTSTRTWALPTYNNHLYKQISNGTSGGSTNDNTYFGYSTPWGYFDFNRFHCHFSPRDWQRLINNNWGFRPKKLNFKLFNIQVKEVTTNEGTKTIANNLTSTVQVFTDSEYQLPYVLGSAHQGCLPPFPADVFMVPQYGYLTLNNGSQALGRSSFYCLEYFPSQMLRTGNNFQFSYTFEDVPFHSSYAHSQSLDRLMNPLIDQYLYYLVRTQTTGTGGTQTLAFSQGGPSTMANQARNWVPGPCYRQQRVSTTQNQNNNSNFAWTGAAKFKLNGRDSLMNPGVAMASHKDDEDRFFPSSGVLIFGKQGANKDGADYSQVLITDEEEIKATNPVATEEYGVVAINQQNANTQAQTGAVHNQGVIPGMVWQNRDVYLQGPIWAKIPHTDGNFHPSPLMGGFGLKHPPPQILIKNTPVPADPPLTFTEAKLNSFITQYSTGQVSVEIEWELQKENSKRWNPEIQYTSNYYKSTSVDFAVNTEGVYSEPRPIGTRYLTRNL

SEQ ID NO: 56 - protein, 733 aa, Adeno-Associated Virus
  source 1..733: note = BCD_0196
MAADGYLPDWLEDNLSEGIREWWDLKPGAPKPKANQQKQDHGRGLVLPGYKYLGPFNGLDKGEPVNEADAAALEHDKAYDQQLKAGDNPYLRYNHADAEFQERLKEDTSFGGNLGRAVFQAKKRILEPLGLVEEGAKTAPGKKRPVEQSPQEPDSSSGIGKTGQQPAKKKLNFGQTGDPESVPDPQPIGEPPAGPSGLGSGTMAAGGGAPMADNNEGADGVGNASGNWHCDSTWLGDRVITTSTRTWALPTYNNHLYKQISSSSSGATNDNHYFGYSTPWGYFDFNRFHCHFSPRDWQRLINNNWGFRPKKLNFKLFNIQVKEVTTNDGVTTIANNLTSTVQVFSDSEYQLPYVLGSAHQGCLPPFPADVFMIPQYGYLTLNNGSQSVGRSSFYCLEYFPSQMLRTGNNFTFSYTFEDVPFHSSYAHSQSLDRLMNPLIDQYLYYLARTQSTTGSTRELQFHQAGPNTMAEQSKNWLPGPCFRQQRLSKNLDFNNNSNFAWTAATKYHLNGRNSLTNPGVAMATNKDDEDQFFPINGVLVFGKTGASNKTTLENVLMTSEEEIKTTNPVATEEYGYVSSNLQSSTAGPQSQTVNNQGALPGMVWQNRDVYLQGPIWAKIPHTDGNFHPSPLMGGFGLKHPPPQILIKNTPVPANPPEVFTPSKFASFITQYSTGQVSVEIEWELQKENSKRWNPEIQYTSNYAKSNNVEFAVNTEGVYTEPRPIGTRYLTRNL

SEQ ID NO: 57 - protein, 738 aa, Adeno-Associated Virus
  source 1..738: note = BCD_0197
MAADGYLPDWLEDNLSKGIREWWDLKPGAPKPKANQQKQDNGRGLVLPGYKYLGPFNGLDKGEPVNAADAAALEHDKAYDQQLKAGDNPYLRYNHADAEFQERLQEDTSFGGNLGRAVFQAKKRVLEPLGLVESPVKTAPGKKRPVEPSPQRSPDSSTGIGKKGQQPAKKRLNFGQTGDSESVPDPQPIGEPPAGPSGLGSGTMAAGGGAPMADNNEGADGVGSSSGNWHCDSTWLGDRVITTSTRTWALPTYNNHLYKQISNGTSGGSTNDNTYFGYSTPWGYFDFNRFHCHFSPRDWQRLINNNWGFRPKRLNFKLFNIQVKEVTQNEGTKTIANNLTSTIQVFTDSEYQLPYVLGSAHQGCLPPFPADVFMIPQYGYLTLNNGSQAVGRSSFYCLEYFPSQMLRTGNNFEFSYNFEDVPFHSSYAHSQSLDRLMNPLIDQYLYYLSRTQSTGGTAGTQQLLFSQAGPNNMSAQAKNWLPGPCYRQQRVSTTLSQNNNSNFAWTGATKYHLNGRDSLVNPGVAMATHKDDEERFFPSSGVLMFGKQGAGKDNVDYSSVMLTSEEEIKTTNPVATEQYGVVADNLQQQNAAPIVGAVNSQGALPGMVWQNRDVYLQGPIWAKIPHTDGNFHPSPLMGGFGLKHPPPQILIKNTPVPADPPTTFNQAKLASFITQYSTGQVSVEIEWELQKENSKRWNPEIQYTSNYYKSTNVDFAVNTEGTYSEPRPIGTRYLTRNL

SEQ ID NO: 58 - protein, 731 aa, Adeno-Associated Virus
  source 1..731: note = BCD_0198
MAADGYLPDWLEDNLSEGIREWWALKPGAPQPKANQQKQDDGRGLVLPGYKYLGPFNGLDKGEPVNEADAAALEHDRAYDQQLQAGDNPYLRYNHADAEFQERLQEDTSFGGNLGRAVFQAKKRVLEPLGLVEEGAKTAPGKKRPVEPDSSSGIGKTGQQPAKKRLNFGQTGDAESVPDPQPLSEPPAGPSGLGSGTMAAGGGAPMADNNEGADGVGNASGNWHCDSTWLGDRVITTSTRTWALPTYNNHLYKQISNGTSGGSSNDNTYFGYSTPWGYFDFNRFHCHFSPRDWQRLINNNWGFRPKKLNFKLFNIQVKEVTQNEGTKTIANNLTSTVQVFTDSEYQLPYVLGSAHQGCLPPFPADVFMIPQYGYLTLNNGSQAVGRSSFYCLEYFPSQMLRTGNNFTFSYTFEDVPFHSSYAHSQSLDRLMNPLIDQYLYYLSRTQTNGTNATQTLLFAQAGPQNMSAQAKNWLPGPCYRQQRVSTTVSQNNNSNFTWTGATKYHLNGRDSLVNPGVAMATHKDDEERFFPSSGVLMFGKQGAGKDNVEYQNVMLTSEEEIKTTNPVATEQYGVVADNLQQTNSAPIVGAVNSQGALPGMVWQNRDVYLQGPIWAKIPHTDGNFHPSPLMGGFGLKHPPPQILIKNTPVPADPPVNFTDAKLASFITQYSTGQVSVEIEWELQKENSKRWNPEIQYTSNYYKSANVDFAVNADGVYSEPRPIGTRYLTRNL

SEQ ID NO: 59 - protein, 739 aa, Adeno-Associated Virus
  source 1..739: note = BCD_0274
MAADGYLPDWLEDNLSEGIREWWALKPGAPQPKANQQHQDDSRGLVLPGYKYLGPFNGLDKGEPVNEADAAALEHDKAYDKQLEQGDNPYLKYNHADAEFQERLQEDTSFGGNLGRAVFQAKKRILEPLGLVEEAAKTAPGKKRPLEKTPNQPTDTQAAGQTPAKKRPQGEQSGDSARRQLDFDPQPAAPIGQPPAAPSPVGSNTMASGGGGPMADDNQGADGVGNASGNWHCDSTWLGDRVITTSTRTWVLPTYNNRIYKQISSESGATNDNHYFGYSTPWGYFDFNRFHCHFSPRDWQRLINNNWGFRPKRLNSKIFNIQVKEVTQIEGGSTIANNLTSTIQVFADSEYQLPCVLGSAHQGCLPPFPADVFMIPQYGYLTLNNGSQSVGRSSFYCLEYFPSQMLRTGNNFQFSYTFESVPFHSSYAHSQSLDRIMNPLVDQYLYYLARTQTGTGSTTSNTRQLQFYQAGPPNMADQSRNWLPGPMYRQQRVSKTLDQNSNTNFAWTAASKYNLNGRKSLANPGIAMATHKDDEERFFPQHGVLVFGQTNATNKTTLDNVLITSEEEIKATNPVATEEYGTVSSNLQSGSTNPTTESVNNQGILPGMVWQDRDVYLQGPIWAKIPHTDGHFHPSPLMGGFGLKHPPPQILIKNTPVPANPPETFTTSKFASYITQYSTGQVSVEIEWELQKENSKRWNPEIQYTSNYAKSNNVEFSVDAAGVYSEPRPIGTRYLTRNL

SEQ ID NO: 60 - protein, 739 aa, Adeno-Associated Virus
  source 1..739: note = BCD_0275
MAADGYLPDWLEDNLSEGIREWWALKPGAPKPKANQQHQDNSRGLVLPGYKYLGPFNGLDKGEPVNEADAAALEHDKAYDKQLEQGDNPYLKYNHADAEFRERLQEDTSFGGNLGRAVFQAKKRILEPLGLVEEAAKTAPGKKRPLEKTPNQPTDTQAAGQTPAKKRPQGEQSGDSARRQLDFDPQPAAPIGQPPAAPSPVGSNTMASGGGGPMADDNQGADGVGNASGNWHCDSTWLGDRVITTSTRTWVLPTYNNHIYKQISSESGATNDNHYFGYSTPWGYFDFNRFHCHFSPRDWQRLINNNWGFRPKRLNFKIFNIQVKEVTQIEGGSTIANNLTSTIQVFADSEYQLPYVLGSAHQGCLPPFPADVFMIPQYGYLTLNNGSQSVGRSSFYCLEYFPSQMLRTGNNFQFSYTFESVPFHSSYAHSQSLDRIMNPLVDQYLYYLARTQTGTGSTTSNTRQLQFYQAGPSNMADQSRNWLPGPMYRQQRVSKTLDQNSNTNFAWTAASKYNLNGRKSLANPGIAMATHKDDEERFFPQHGVLVFGQTNATNKTTLDNVLITSEEEIKATNPVATEEYGTVSSNLQSGSTNPTTESVNNQGILPGMVWQDRDVYLQGPIWAKIPHTDGHFHPSPLMGGFGLKHPPPQILIKNTPVPANPPETFTTSKFASYITQYSTGQVSVEIEWELQKENSKRWNPEIQYTSNYAKSNNVEFSVDAAGVYSEPRPIGTRYLTRNL

SEQ ID NO: 61 - protein, 739 aa, Adeno-Associated Virus
  source 1..739: note = BCD_0276
MAADGYLPDWLEDNLSEGIREWWALKPGAPKPKANQQHQDNSRGLVLPGYKYLGPFNGLDKGEPVNEADAAALEHDKAYDKQLEQGDNPYLKYNHADAEFQERLQEDTSFGGNLGRAVFQAKKRILEPLGLVEEAAKTAPGKKRPLEKTPNQPTDTQAAGQTPAKKRPQGEQSGDSARRQLDFDPQPAAPIGPPPAAPSPVGSNTMASGGGGPMADDNQGADGVGNASGNWHCDSTWLGDRVITTSTRTWVLPTYNNHIYKQISSESGATNDNHYFGYSTPWGYFDFNRFHCHFSPRDWQRLINNNWGFRPKRLNFKIFNIQVKEVTQIEGGSTIANNLTSTIQVFADSEYQLPYVLGSAHQGCLPPFPADVFMIPQYGYLTLNNGSQSVGRSSFYCLEYFPSQMLRTGNNFQFSYTFESVPFHSSYAHSQSLDRIMNPLVDQYLYYLARTQTGTGSTTSNTRQLQFYQAGPSNMADQSRNWLPGPMYRQQRVSKTLDQNSNTNFAWTAASKYNLNGRKSLANPGIAMATHKDDEERFFPQHGVLVFGQTNATNKTTLDNVLITSEEEIKATNPVATEEYGTVSSNLQSGSTNPTTESVNNQGILPGMVWQDRDVYLQGPIWAKIPHTDGHFHPSPLMGGFGLKHPPPQILIKNTPVPANPPETFTTPKFASYITQYSTGQVSVEIEWELQKENSKRWNPEIQYTSNYAKSNNVEFSVDAAGVYSEPRPIGTRYLTRNL

SEQ ID NO: 62 - protein, 739 aa, Adeno-Associated Virus
  source 1..739: note = BCD_0277
MAADGYLPDWLEDNLSEGIREWWALKPGAPKPKANQQHQDNSRGLVLPGYKYLGPFNGLDKGEPVNEADAAALEHDKAYDKQLEQGDNPYLKYNHADAEFQERLQEDTSFGGNLGRAVFQAKKRILEPLGLVEEAAKTAPGKKRPLEKTPNQPTDTQAAGQTPAKKRPQGEQSGDSARRQLDFDPQPAAPIGQPPAAPSPVGSNTMASGGGGPMADDNQGADGVGNASGNWHCDSTWLGDRVITTSTRTWVLPTYNNHIYKQISSESGATNDNHYFGYSTPWGYFDFNRFHCHFSPRDWQRLINNNWGFRPKRLNFKIFNIQVKEVTQIEGGSTIANNLTSTIQVFADSEYQLPYVLGSAHQGCLPPFPADVFMIPQYGYLTLNNGSQSVGRSSFYCLEYFPSQMLRTGNNFQFSYTFESVPFHSSYAHSQSLDRIMNPLVDQYLYYLARTQTGTGSTTSNTRQLQFYQAGPSNMADQSRNWLPGPMYRQQRVSKTLDQNSNTNFAWTAASKYNLNGRKSLANPGIAMATHKDDEERFFPQHGVLVFGQTNATNKTTLDNVLITSEEEIKATNPVATEEYGTVSSNLQSGSTNPTTESVNNQGILPGMVWQDRDVYLQGPIWAKIPHTDGHFHPSPLMGGFGLKHPPPQILIKNTPVPANPPETFTTSKFASYITQYSTGQVSVEIEWELQKENSKRWNPEIQYTSNYAKSNNVEFSVDAAGVYSEPRPIGTRYLTRNL

SEQ ID NO: 63 - protein, 739 aa, Adeno-Associated Virus
  source 1..739: note = BCD_0278
MAADGYLPDWLEDNLSEGIREWWALKPGAPKPKANQQHQDNSRGLVLPGYKYLGPFNGLDKGEPVNEADAAALEHDKAYDKQLEQGDNPYLKYNHADAEFQERLQEDTSFGGNLGRAVFQAKKRILEPLGLVEEAAKTALGKKRPLEKTPNQPTDTQAAGQTPAKKRPQGEQSGDSARRQLDFDPQPAAPIGQPPAAPSPVGSNTMASGGGGPMADDNQGADGVGNASGNWHCDSTWLGDRVITTSTRTWVLPTYNNHIYKQISSESGATNDNHYFGYSTPWGYFDFDRFHCHFSPRDWQRLINNNWGFRPKRLNFKIFNIQAKEVTQIEGGSTIANNLTSTIQVFADSEYQLPYVLGSAHQGCLPPFPAGVFMIPQYGYLTLNNGSQSVGRSSFYCLEYFPSQMLRTGNNFQFSYTFESVPFHSSYAHSQSLDRIMNPLVDQYLYYLARTQTGTGSTTSNTRQLQFYQAGPSNMADQSRNWLPGPMYRQQRVSKTLDQNSNTNFAWTAASKYNLNGRKSLANPGIAMATHKDDEERFFPQHGVLVFGQTNATNKTTLDNVLITSEEEIKATNPVATEEYGTVSSNLQSGSTNPTTESVNNQGILPGMVWQDRDVYLRGPIWAKIPHTDGHFHTSPLMGGFGLKHPPPQILIKNTPVPANPPETFTTSKFASYITQYSTGQVSVEIEWELQKENSKRWNPEIQYTSNYAKSNNVEFSVDAAGVYSEPRPIGTRCLTRNL

SEQ ID NO: 64 - protein, 739 aa, Adeno-Associated Virus
  source 1..739: note = BCD_0279
MAADGYLPDWLEDNLSEGIREWWALKPGAPKPKANQQHQDNSRGLVLPGYKYLGPFNGLDKGEPVNEADAAALEHDKAYDKQLEQGDNPYLKYNHADAEFQERLQEDTFFGGNLGRAVFQAKKRIPEPLGLVEEAAKTAPGKKRPLEKTPNQPTDTQAAGQTPAKKRPQGEQSGDSARRQLDFDPQPAAPIGQPPAAPSPVGSNTMASGGGGPMADDNQGADGVGNASGNWHCDSTWLGDRVITTSTRTWVLPTYNNHIYKQISSESGATNDNHYFGYSTPWGYFDFNRFHCHFSPRDWQRLINNNWGFRPKRLNFKIFNIQVKEVTQIEGGSTIANNLTSTIQVFADSEYQLPYVLGSAHQGCLPPFPADVFMIPQYGYLTLNNGSQSVGRSSFYCLEYSPSQMLRTGNNFQFSYTFESVPFHSSYAHSQSLDRIMNPLVDQYLYYLARTQTGTGSTTSNTRQLQFYQAGPSNMADQSRNWLPGPMYRQQRVSKTLDQNSNTNFAWTAASKYNLNGRKSLANPGIAMATHKDDEERFFPQHGVLVFGQTNATNKTTLDNVLITSEEEIKATNPVATEEYGTVSSNLQSGSTNPTTESVNNQGILPGMVWQDRDVYLQGPIWAKIPHTDGHFHPSPLMGGFGLKHPPPQILIKNTPVPANPPETFTTSKFASYITQYSTGQVSVEIEWELQKENSKRWNPEIQYTSNYAKSNNVEFSVDAAGVYSEPRPIGTRYLTRNL

SEQ ID NO: 65 - protein, 739 aa, Adeno-Associated Virus
  source 1..739: note = BCD_0280
MAADGYLPDWLEDNLSEGIREWWALKPGAPQPKANQQHQDNSRGLVLPGYKYLGPFNGLDKGEPVNEADAAALEHDKAYDKQLEQGDNPYLKYNHADAEFQERLQEDTSFGGNLGRAVFQAKKRILEPLGLVEEAAKTAPGKKRPLEKTPNQPTDTQAAGQTPAKKRPRGEQSGDSARRQLDFDPQPAAPIGQPPAAPSPVGSNTMASGGGGPMADDNQGADGVGNASGNWHCDSTWLGDRVITTSTRTWVLHTYNNHIYKQISSESGATNDNHYFGYSTPWGYFDFNRFHCHFSPRDWQRLINNNWGFRPKRLNFKIFNIQVKEVTQIEGGSTIANNLTSTIQVFADSEYQLPYVLGSAHQGCLPPFPADVFMIPQYGYLTLNNGSQSVGRSSFYCLEYFPSQMLRTGNNFQFSYTFESVPFHSSYAHSQSLDRIMNPLVDQYLYYLARTQTGTGSTTSNTRQLQFYQAGPSNMADQSRNWLPGPMYRQQRVSKTLDQNSNTNFAWTAASKYNLNGRKSLANPGIAMATHKDDEERFFPQHGVLVFGQTNATNKTTLDNVLITSEEEIKATNPVATEEYGTVSSNLQASNTNPTTETVNNQGILPGMVWQDRDVYLQGPIWAKIPHTDGHFHPSPLMGGFGLKHPPPQILIKNTPVPANPPETFTTSKFASYITQYSTGQVSVEIEWELQKENSKRWNPEIQYTSNYAKSNNVEFSVDAAGVYSEPRPIGTRYLTRNL

SEQ ID NO: 66 - protein, 739 aa, Adeno-Associated Virus
  source 1..739: note = BCD_0281
MAADGYLPDWLEDNLSEGIREWWALKPGAPQPKANQQHQDNSRGLVLPGYKYLGPFNGLDKGEPVNEADAAALEHDKAYDKQLEQGDNPYLKYNHADAEFQERLQEDTSFGGNLGRAVFQAKKRILEPLGLVEEAAKTAPGKKRPLEKTPNQPTDTQAAGQTPAKKRPQGEQSGDSARRQLDFDPQPAAPIGQPPAAPSPVGSNTMASGGGGPMADDNQGADGVGNASGNWHCDSTWLGDRVITTSTRTWVLPTYNNHIYKQISSESGATNDNHYFGYSAPWGYFDFNRFHCHFSPRDWQRLINNNWGFRPKRLNFKIFNIQVKEATQIEGGSTIANNLTSTIQVFADSEYQLPYVLGSAHQGCLPPFPADVFMIPQYGYLTLNNGSQPVGRSSFYCLEYFPSQMLRTGNNFQFSYTFESVPFHSSYAHSQSLDRIMNPLVDQYLYYLARTQTGTGSTTSNTRQLQFYQAGPSNMADQSRNWLPGPMYRQQRVSKTLDQNSNTNFAWTAASKYNLNGRKSLANPGIAMATHKDDEERFFPQHGVLVSGQTNATNKTTLDNVLITSEEEIKATNPVATEEYGTVSSNLQASNTNPTTETVNNQGILPGMVWQDRDVYLQGPIWAKIPHTDGHFHPSPLMGGFGLKHPPPQILIKNTPVPANPPETFTTSKFASYITQYSTGQVSVEIEWELQKENSKRWNPEIQYTSNYAKSNNVEFSVDAAGVYSEPRPIGTRYLTRNL

SEQ ID NO: 67 - protein, 739 aa, Adeno-Associated Virus
  source 1..739: note = BCD_0282
MAADGYLPDWLEDNLSEGIREWWALKPGAPQPKANQQHQDNSRGLVLPGYKYLGPFNGLDKGEPVNEADAAALEHDKAYDKQLEQGDNPYLKYNHADAEFQEHLQEDTSFGGNLGRAVFQAKKRILEPLGLVEEAAKTAPGKKRPLEKTPNQPTDTQAAGQTPAKKRPQGEQSGDSARRQLDFDPQPAAPIGQPPAAPSPVGSNTMASGGGGPMADDNQGADGVGNASGNWHCDSTWLGDRVITTSTRTWVLPTYNNHIYKQISSESGATNDNHYFGYSTPWGYFDFNRFHCHFSPRDWQRLINNNWGFRPKRLNFKIFNIQVKEVTQIEGGSTIANNLTSTIQVFADSEYQLPYVLGSAHQGCLPPFPADVFMIPQYGYLTLNNGSQSVGRSSFYCLEYFPSQMLRTGNNFQFSYTFESVPFHSSYAHSQSLDRIMNPLVDQYLYYLARTQTGTGSTTSNTRQLQFYQAGPSNMADQSRNWLPGPMYRQQRVSKTLDQNSNTNFAWTAASKYNLNGRKSLANPGIAMATHKDDEERFFPQHGVLVFGQTNATNKTTLDNVLITSEEEIKATNPVATEEYGTVSSNPQASNTNPTTETVNNQGILPGMVWQDRDVYLQGPIWAKIPHTDGHFHPSPLMGGFGLKHPPPQILIKNTPVPANPPETFTTSKFASYITQYSTGQVSVEIEWELQKENSKRWNPEIQYTSNYAKSNNVEFSVDAAGVYSEPRPIGTRYLTRNL

SEQ ID NO: 68 - protein, 739 aa, Adeno-Associated Virus
  source 1..739: note = BCD_0283
MAADGYLPDWLEDNLSEGIREWWALKPGAPQPKANQQHQDNSRGLVLPGYEYLGPFNGLDKGEPVNEADAAALEHDKAYDKQLEQGDNPYLKYNHADAEFQERLQEDTSFGGNLGRAVFQAKKRILEPLGLVEEAAKTAPGKKRPLEKTPNQPTDTQAAGQTPAKKRPQGEQSGDSARRQLDFDPQPAAPIGQPPAAPSPVGSNTMASGGGGPMADDNQGADGVGNASGNWHCDSTWLGDRVITTSTRTWVLPTYNNHIYKQISSESGATNDNHYFGYSTPWGYFDFNRFHCHFSPRDWQRLINNNWGFRPKRLNFKIFNIQVKEVTQIEGGSTIANNLTSTIQVFADSEYQLPYVLGSAHQGCLPPFPADVFMIPQYGYLTLNNGSQSVGRSSFYCLEYFPSQMLRTGNNFQFSYTFESVPFHSSYAHSQSLDRIMNPLVDQYLYYLARTQTGTGSTTSNTRQLQFYQAGPSNMADQSRNWLPGPMYRQQRVSKTLDQNSNTNFAWTAASKYNLNGRKSLANPGIAMATHKDDEERFFPQHGVLVFGQTNATNKTTLDNVLITSEEEIKATNPVATEEYGTVSSNLQASNTNPTTETVNNQGILPGMVWQDRDVYLQGPIWAKIPHTDGHFHPSPLMGGFGLEHPPPQILIKNTPVPANPPETFTTSKFASYITQYSTGQVSVEIEWELQKENSKRWNPEIQYTSNYAKSNNVEFSVDAAGVYSEPRPIGTRYLTRNL

SEQ ID NO: 69 - protein, 739 aa, Adeno-Associated Virus
  source 1..739: note = BCD_0284
MAADGYLPDWLEDNLSEGIREWWALKPGAPQPKANQQHQDNSRGLVLPGYKYLGPFNGLDKGEPVNEADAAALEHDKAYDKQLEQGDNPYLKYNHADAEFQERLQEDTSFGGNLGRAVFQAKKRILEPLGLVEEAAKTAPGKKRPLEKTPNQPTDTQAAGQTPAKKRPQGEQSGDSARRQLDFDPQPAAPIGQPPAAPSPVGSNTMASGGGGPMADDNQGADGVGNASGNWHCDSTWLGDRVITTSTRTWVLPTYNNHIYKQISSESGATNDNHYFGYSTPWGYFDFNRFHCHFSPRDWQRLINNNWGFRPKRLNFKIFNIQVKEVTQIEGGSTIANNLTSTIQVFADSEYQLPYVLGSAHQGCLPPFPADVFMIPQYGYLTLNNGSQSVGRSSFYCLEYFPSQMLRTGNNFQFSYTFESVPFHSSYAHSQSLDRIMNPLVDQYLYYLARTQTGTGSTTSNTRQLQFYQAGPSNMADQSRNWLPGPMYRQQRVSKTLDQNSNTNFAWTAASKYNLNGRKSLANPGIAMATHKDDEERFFPQHGVLVFGQTNATNKTTLDNVLITSEEEIKATNPVATEEYGTVSSNLQASNTNPTTETVNNQGILPGMVWQDRDVYLQGPIWAKIPHTDGHFHPSPLMGGFGLKHPPPQILIKNTPVPANPPETFTTSKFASYITQYSTGQVSVEIEWELQKENSKRWNPEIQYTSNYAKSNNVEFSVDAAGVYSEPRPIGTRYLTRNL

SEQ ID NO: 70 - protein, 739 aa, Adeno-Associated Virus
  source 1..739: note = BCD_0285
MAADGYLPDWLEDNLSEGIREWWALKPGAPQPKANQQHQDNSRGLVLPGYKYLGPFNGLDKGEPVNEADAAALEHDKAYDKQLEQGDNPYLKYNHADAEFQERLQEDTSFGGNLGRAVFQAKKRILEPLGLVEEAAKTAPGKKRPLEKTPNQPTDTQAAGQTPAKKRPQGEQSGDSARRQLDFDPQPAAPIGQPPAAPSPVGSNTMASGGGGPMADDNQGADGVGNASGNWHCDSTWLGDRVITTSTRTWVLPTYNNHIYKQISSESGATNDNHYFGYSTPWGYFDFNRFHCHFSPRDWQRLINNNWGFRPKRHNFKIFNIQVKEVTQIEGGSTIANNLTSTIQVFADSEYQLPYVLGSAHQGCLPPFPADVFMIPQYGYLTLNNGSQSVGRSSFYCLEYFPSQMLRTGNNFQFSYTFESVPFHSSYAHSQSLDRIMNPLVDQYLYYLARTQTGTGSTTSNTRQPQFYQAGPSNMADQSRNWLPGPMYRQQRVSKTLDQNSNTNFAWTAASKYNLNGRKSLANPGIAMATHKDDEERFFPQHGVLVFGQTNAANKTTLDNVLITSEEEIKATNPVATEEYGTVSSNLQASNTNPTTETVNNQGILPGMVWQDRDVYLQGPIWAKIPHTDGHFHPSPLMGGFGLKHPPPQILIKNTPVPANPPETSTTSKFASYITQYSTGQVSVEIEWELQKENSKRWNPEIQYTSNYAKSNNVEFSVDAAGVYSEPRPIGTRYLTRNL

SEQ ID NO: 71 - protein, 739 aa, Adeno-Associated Virus
  source 1..739: note = BCD_0286
MAADGYLPDWLEDNLSEGIREWWALKPGAPQPKANQQHQDNGRGLVLPGYKYLGPFNGLDKGEPVNEADAAALEHDKAYDKQLEQGDNPYLKYNHADAEFQERLQEDTSFGGNLGRAVFQAKKRILEPLGLVEEAAKTAPGKKRPLEKTPNQPTDTQAAGQTPAKKRPQGEQSGDSARRQLDFDPQPAAPIGQPPAAPSPVGSNTMASGGGGPMADDNQGADGVGNASGNWHCDSTWLGDRVITTSTRTWVLPTYNNHIYKQISSESGATNDNHYFGYSTPWGYFDFNRFHCHFSPRDWQRLINNNWGFRPKRLNFKIFNIQVKEVTQIEGGSTIANNLTSTIQVFADSEYQLPYVLGSAHQGCLPPFPADVFMIPQYGYLTLNNGSQSVGRSSFYCLEYFPSQMLRTGNNFQFSYTFESVPFHSSYAHSQSLDRIMNPLVDQYLYYLARTQTGTGSTTSNTRQLQFYQAGPSNMADQSRNWLPGPMYRQQRVSKTLDQNSNTNFAWTAASKYNLNGRKSLANPGIAMATHKDDEERFFPQHGVLVFGQTNATNKTTLDNVLITSEEEIKATNPVATEEYGTVSSNLQSSTTNPTTESVNNQGILPGMVWQDRDVYLQGPIWAKIPHTDGHFHPSPLMGGFGLKHPPPQILIKNTPVPANPPETFTTSKFASYITQYSTGQVSVEIEWELQKENSKRWNPEIQYTSNYAKSNNVEFSVDAAGVYSEPRPIGTRYLTRNL

SEQ ID NO: 72 - protein, 739 aa, Adeno-Associated Virus
  source 1..739: note = BCD_0287
MAADGYLPDWLEDNLSEGIREWWALKPGAPQPKANQQHQDNGRGLVLPGYKYLGPFNGLDKGEPVNEADAAALEHDKAYDKQLEQGDNPYLKYNHADAEFQERLQEDTSFGGNLGRAVFQAKKRILEPLGLVEEAAKTAPGKKRPLEKTPNQPTDTQAAGQTPAKKRPQGEQSGDSARRQLDFDPQPAAPIGQPPAAPSPVGSNTMASGGGGPMADDNQGADGVGNASGNWHCDSTWLGDRVITTSTRTWVLPTYNNHVYKQISGESGATNDNHYFGYSTPWGYFDFNRFHCHFSPRDWQRLINNNWGFRPKRLNFKIFNIQVKEVTQIEGGSTIANNLTSTIQVFADSEYQLPYVLGSAHQGCLPPFPADVFMIPQYGYLTLNNGSQSVGRSSFYCLEYFPSQMLRTGNNFQFSYTFESVPFHSSYAHSQSLDRIMNPLVDQYLYYLARTQTGTGSTTSNTRQLQFYQAGPSNMADQSRNWLPGPMYRQQRVSKTLDQNSNTNFAWTAASKYNLNGRKSLANPGIAMATHKDDEERFFPQHGVLVFGQTNATNKTTLDNVLITSEEEIKATNPVATEEYGTVSSNLQSSTTNPTTESVNNQGILPGMVWQDRDVYLQGPIWAKIPHTDGHFHPSPLMGGFGLKHPPPQILIKNTPVPANPPETFTTSKFASYITQYSTGQVSVEIEWELQKENSKRWNPEIQYTSNYAKSNNVEFSADAAGVYSEPRPIGTRYLTRNL

SEQ ID NO: 73 - protein, 739 aa, Adeno-Associated Virus
  source 1..739: note = BCD_0288
MAADGYLPDWLEDNLSEGIREWWALKPGAPQPKANQQHQDNGRGLVLPGYKYLGPFNGLDKGEPVNEADAAALEHDKAYDKQLEQGDNPYLKYNHADAEFQERLQEDTSFGGNLGRAVFQAKKRILEPLGLVEEAAKTAPGKKRPLEKTPNQPTDTQAAGQTPAKKRPQGEQSGDSARRQLDFDPQPAAPIGQPPAAPSPVGSNTMASGGGGPMADDNQGADGVGNASGNWHCDSTWLGDRVITTSTRTWVLPTYNNHIYKQISSESGATNDNHYFGYSTPWGYFDFNRFHCHFSPRDWQRLINNNWGFRPKRLNFKIFNIQVKEVTQIEGGSTIANNLTSTIQVFADSEYQLPYVLGSAHQGCLPPFPADVFMIPQYGYLTLNNGSQSVGRSSFYCLEYFPSQMLRTGNNFQFSYTFESVPFHSSYAHSQSLDRIMNPLVDQYLYYLARTQTGTGSTTSNTRQLQFYQAGPSNMADQSRNWLPGPMYRQQRVSKTLDQNSNTNFAWTAASKYNLNGRKSLANPGIAMATHKDDEERFFPQHGVLVFGQTNATNKTTLDNVLITSEEEIKATNPVATEEYGTVSSNLQSSTTNPTTESVNNQGILPGMVWQDRDVYLQGPIWAKIPHTDGHFHPSPLMGGFGLKHPPPQILIKNAPVPANPPETFTTSKFASYITQYSTGQVSVEIEWELQKENSKRWNLEIQYTSNYAKSNNVEFSVDAAGVYSEPRPIGTRYLTRNL

SEQ ID NO: 74 - protein, 739 aa, Adeno-Associated Virus
  source 1..739: note = BCD_0289
MAADGYLPDWLEDNLSEGIREWWALKPGAPQPKANQQHQDNGRGLVLPGYKYLGPFNGLDKGEPVNEADAAALEHDKAYDKQLEQGDNPYLKYNHADAEFQERLQEDTSFGGNLGRAVFQAKKRILEPLGLVEEAAKTAPGKKRPLEKAPNQPTDTQAAGQTPAKKRPQGEQSGDSARRQLDFDPQPAAPIGQPPAAPSPVGSNTMASGGGGPMADDNQGADGVGNASGNWHCDSTWLGDRVITTSTRTWVLPTYNNHIYKQISSESGATNDNHYFGYSTPWGYFDFNRFHCHFSPRDWQRLINNNWGFRPKRLNFKIFNIQVKEVTQIEGGSTIANNLTSTIQVFADSEYQLPYVLGSAHQGCLPPFPADVFMIPQYGYLTLNNGSQSVGRSSFYCLEYFPSQMLRTGNNFQFSYTFESVPFHSSYAHSQSLDRIMNPLVDQYLYYLARTQTGTGSTTSNTRQLQFYQAGPSNMADQSRNWLPGPMYRQQRVSKTLDQNSNTNFAWTAASKYNLNGRKSLANPGIAMATHKDDEERFFPQHGVLVFGQTNATNKTTLDTVLITSEEEIKATNPVATEEYGTVSSNLQSSTTNPTTESVNNQGILPGMVWQDRDVYLQGPIWAKIPHTDGHFHPSPLMGGFGLKHPPPQILIKNTPVPANPPETFTTSKFASYITQYSTGQVSVEIEWELQKENSKRWNPEIQYTSNYAKSNNVEFSVDAAGVYSEPRPIGTRYLTRNL

SEQ ID NO: 75 - protein, 739 aa, Adeno-Associated Virus
  source 1..739: note = BCD_0290
MAADGYLPDWLEDNLSEGIREWWALKPGAPQPKANQQHQDNGRGLVLPGYKYLGPFNGLDKGEPVNEADAAALEHDKAYDKQLEQGDNPYLKYNHADAEFQERLQEDTSFGGNLGRAVFQAKKRILEPLGLVEEAAKTAPGKKRPLEKTPNQPTDTQAAGQTPAKKRPQGEQSGDSARRQLDFDPQPAAPIGQPPAAPSPVGSNTMASGGGGPMADDNQGADGVGNASGNWHCDSTWLGGRVITTSTRTWVLPTYNNHIYKQISSESGATNDNHYFGYSTPWGYFDFNRFHCHFSPRDWQRLINNNWGFRPKRLNFKIFNIQVKEVTQIEGGSTIANNLTSTIQVFADSEYQLPYVLGSAHQGCLPPFPADVFMIPQYGYLTLNNGSQSVGRSSFYCLEYFPSQMLRTGNNFQFSYTFESVPFHSSYAHSQSLDRIMNPLVDQYLYYLARTQTGTGSTTSNTRQLQFYQAGPSNMADQSRNWLPGPMYRQQRVSKTLDQSSNTNFAWTAASKYNLNGRKSLANPGIAMATHKDDEERFFPQHGVLVFGQTNATNKTTLDNVLITSEEEIKATNPVATEEYGTVSSNLQSSTTNPTTESVNNQGILPGMVWQDRDVYLQGPIWAKIPHTDGHFHPSPLMGGFGLKHPPPQILIKNTPVPANPPETFTTSKFASYITQYSTGQVSVEIEWELQKENSKRWNPEIRYTSNYAKSNNVEFSVDAAGVYSEPRPIGTRYLTRNL

SEQ ID NO: 76 - protein, 739 aa, Adeno-Associated Virus
  source 1..739: note = BCD_0291
MAADGYLPDWLEDNLSECIREWWALKPGAPQPKANQQHQDNGRGLVLPGYKYLGPFNGLDKGEPVNEADAAALEHDKAYDKQLEQGDNPYLKYNHADAEFQERLQEDTSFGGNLGRAVFQAKKRILEPLGLVEEAAKTAPGKKRPLEKTPNQPTDTQAAGQTPAKKRPQGEQSGDSARRQLDFDPQPAAPIGQPPAAPSPVGSNTMASGGGGPMADDNQGADGVGNASGNWHCDSTWLGDRVITTSTRTWVLPTYNNHIYKQISSESGATNDNHYFGYSTPWGYFDFNRFHCHFSPRDWQRLINNNWGFRPERLNFKVFNIQVKEVTQIEGGSTIANNLTSTIQVFADSEYQLPYVLGSAHQGCLPPFPADVFMIPQYGYLTLNNGSQSVGRSSFYCLEYFPSQMLRTGNNFQFSYTFESVPFHGSYAHSQSLDRIMNPLVDQYLYYLARTQTGTGSTTSNTRQLQFYQAGPSNMADQSRNWLPGPMYRQQRVSKTLDQNSNTNFAWTAASKYNLNGRKSLANPGIAMATHKDDEERFFPQHGVLVFGQTNATNKTTLDNVLITSEEEIKATNPVATEEYGTVSSNLQSSTTNPTTESVNNQGILPGMVWQDRDVYLQGPIWAKIPHTDGHFHPSPLMGGFGLKHPPPQILIKNTPVPANPPETFTTSKFASYITQYSTGQVSVEIEWELQKENSKRWNPEIQYTSNYAKSNNVEFSVDAAGVYSEPRPIGTRYLTRNL

SEQ ID NO: 77 - protein, 739 aa, Adeno-Associated Virus; identical to SEQ ID NO: 71
  source 1..739: note = BCD_0292

SEQ ID NO: 78 - protein, 739 aa, Adeno-Associated Virus
  source 1..739: note = BCD_0293
MAADGYLPDWLEDNLSEGIREWWALKPGAPQPKANQQHQDNGRGLVLPGYKYLGPFNGLDEGEPVNEADAAALEHDKAYDKQLEQGDNPYLKYNHADAEFQERLQEDTSFGGNLGRAVFQAKKRILEPLGLVEEAAKTAPGKKRPLEKTPNQPTDTQAAGQTPAKKRPQGEQSGDSARRQLDFDPQPAAPIGQPPAAPSPVGSNTMASGGGGPMADDNQGADGVGNASGNWHCDSTWLGDRVITTSTRTWVLPTYNNHIYKQISSESGATNDNHYFGYSTPWGYFDFNRFHCHFSPRDWQRLINNNWGFRPKRLNFKIFNIQVKEVTQIEGGSTIANNLTSTIQVFADSEYQPPYVLGSAHQGCLPPFPADVFMIPQYGYLTLNNGSQSVGRSSFYCLEYFPSQMLRTGNNFQFSYTFESVPFHSSYAHSQSLDRIMNPLVDQYLYYLARTQTGTGSTTSNTRQLQFYQAGPSNMADQSRNWLPGPMYRQQRVSKTLDQNSNTNFAWTAASKYNLNGRKSLANPGIAMATHKDDEERFFPQHGVLVFGQTNATNKTTLDNVLITSEEEIKATNPVATEEYGTVSSNLQSSTTNPTTESVNNQGILPGMVWQDRDVYLQGPIWAKIPHTDGHFHPSPLMGGFGLKHPPPQILIKNTPVPANPPETFTTSKFASYITQYSTGQVSVEIEWELQEENSKRWNPEIQYTSNYAKSNNVEFSVDAAGVYSEPRPIGTRYLTRNL

SEQ ID NO: 79 - protein, 739 aa, Adeno-Associated Virus
  source 1..739: note = BCD_0294
MAADGYLPDWLEDNLSEGIREWWALKPGAPQPKANQQHQDNGRGLVLPGYKYLGPLNGLDKGEPVNEADAAALEHDKAYDKQLEQGDNPYLKYNHADAEFQERLQEDTSFGGNLGRAVFQAKKRILEPLGLVEEAAKTAPGKKRPLEKTPNQPTDTQAAGQTPAKKRPQGEQSGDSARRQLDFDPQPAAPIGQPPAAPSPVGSNTMASGGGGPMADDNQGADGVGNASGNWHCDSTWLGDRVITTSTRTWVLPTYNNHIYKQISSESGATNDNHYFGYSTPWGYFDFNRFHCHFSPRDWQRLINNNWGFRPERLNFKIFNIQVKEVTQIEGGSTIANNLTSTIQVFADSEYQLPYVLGSAHQGCLPPFPADVFMIPQYGYLTLNNGSQSVGRSSFYCLEYFPSQMLRTGNNFQFSYTFESVPFHSSYAHSQSLDRIMNPLVDQYLYYLARTQTGTGSTTSNTRQLQFYQAGPSNMADQSRNWLPGPMYRQQRVSKTLDQNSNTNFAWTAASKYNLNGRKSLANPGIAMATHKDDEERFFPQHGVLVFGQTNATNKTTLDNVLITSEEEIKATNPVATEEYGTVSSNLQSSTTNPTTESVNNQGILPGMVWQDRDVYLQGPIWAKIPHTDGHFHPSPLMGGFGLKHPPPQILIKNTPVPANPPETFTTSKFASYITQYSTGQVSVEIEWELQKENSKRWNPEIQYTSNYAKSNNVEFSVDAAGVYSEPRPIGTRYLTRNL

SEQ ID NO: 80 - protein, 739 aa, Adeno-Associated Virus
  source 1..739: note = BCD_0295
MAADGYLPDWLEDNLSEGIREWWALKPGAPQPKANQQHQDNGRGLVLPGYKYLGPFNGLDKGEPVNEADAAALEHDKAYDKQLEQGDNPYLKYNHADAEFQERLQEDTSFGGNLGRAAFQAKKRILEPLGLVEEAAKTAPGKKRPLEKTRNQPTDTQAAGQTPAKKRPQGEQSGDSARRQLDFDPQPAAPIGQPPAAPSPVGSNTMASGGGGPMADDNQGADGVGNASGNWHCDSTWLGDRVITTSTRTWVLPTYNNHIYKQISSESGATNDNHYFGYSTPWGYFDFNRFHCHFSPRDWQRLINNNWGFRPKRLNFKIFNIQVKEVTQIEGGSTIANNLTSTIQVFADSEYQLPYVLGSAHQGCLPPFPADVFMIPQYGYLTLNNGSQSVGRSSFYCLEYFPSQMLRTGNNFQFSYTFESVPFHSSYAHSQSLDRIMNPLVDQYLYYLARTQTGTGSTTSNTRQLQFYQAGPSNMADQSRNWLPGPMYRQQRVSKTLDQNSNTNFAWTAASKYNLNGRKSLANPGIAMATHKDDEERFFPQHGVLVFGQTNATNKTTLDNVLITSEEEIKATNPVATEEYGTVSSNLQSSTTNPTTESVNNQGILPGMVWQDRDVYLQGPIWAKIPHTDGHFHPSPLVGGFGLKHPPPQILIKNTPVPANPPETFTTSKFASYITQYSTGQVSVEIEWELQKENSKRWNPEIQYTSNYAKSNNVEFSVDAAGVYSEPRPIGTRYLTRNL

SEQ ID NO: 81 - protein, 739 aa, Adeno-Associated Virus
  source 1..739: note = BCD_0296
MAADGYLPDWLEDNLSEGIREWWALKPGAPKPKANQQHQDNSRGLVLPGYKYLGPFNGLDKGEPVNEADAAALEHDKAYDKQLEQGDNPYLKYNHADAEFQERLQEDTSFGGNLGRAVFQAKKRILEPLGLVEEAAKTAPGKKRPLEKTPNRPTDTQAAGQTPAKKRPQGEQSGDSARRQLDFDPQPAAPIGQPPAAPSPVGSNTMASGGGGPMADDNQGADGVGNASGNWHCDSTWLGDRVITTSTRTWVLPTYNNHIYKQISSESGATNDNHYFGYSTPWGYFDFNRFHCHFSPRDWQRLINNNWGFRPKRLNFKIFNIQVKEVTQIEGGSTIANNLTSTIQVFADSEYQLPYVLGSAHQGCLPPFPADVFMIPQYGYLTLNNGSQSVGRSSFYCLEYFPSQMLRTGNNFQFSYTFESVPFHSSYAHSQSLDRIMNPLVDQYLYYLARTQTGTGSTTSNTRQLQFYQAGPSNMADQSRNWLPGPMYRQQRVSKTLDQNSNTNFAWTAASKYNLNGRKSLANPGIAMATHKDDEERFFPQHEVLVFGQTNATNKTTLDNVLITSEEEIKATNPVATEEYGTVSSNLQSGSTNPTTESVNNQGILPGMVWQDRDVYLQGPIWAKIPHTDGHFHPSPLMGGFGLKHPPPQILIKNTPVPANPPETFTTSKFASYITQYSTGQVSVEIEWELQKENSKRWNPEIQYTSNYAKSNNVEFSVDAAGVYSEPRPIGTRYLTRNL

SEQ ID NO: 82 - protein, 739 aa, Adeno-Associated Virus
  source 1..739: note = BCD_0297
MAADGYLPDWLEDNLSEGIREWWALKPGAPKPKANQQHQDNSRGLVLPGYKYLGPFNGLDKGEPVNEADAAALEHDKAYDKQLEQGDNPYLKYNHADAEFQERLQEDTSFGGNLGRAVFQAKKRILEPLGLVEEAAKTAPGKKRPLEKTPNQPTDTQAAGQTPAKKRPQGEQSGDSARRQLDFDPQPAAPIGQPPAAPSPVGSSTMASGGGGPMADDNQGADGVGNASGNWHCDSTWLGDRVITTSTRTWVLPTYNNHIYKQISSESGATNDNHYFGYSTPWGYFDFNRFHCHFSPRDWQRLINNNWGFRPKRLNFKIFNIQVKEVTQIEGGSTIANNLTSTIQVFADSEYQLPYVLGSAHQGCLPPFPADVFMIPQYGYLTLNNGSQSVGRSSFYCLEYFPSQMLRTGNNFQFSYTFESVPFHSSYAHSQSLDRIMNPLVDQYLYYLARTQTGTGSTTSNTRQLQFYQAGPSNMADQSRNWLPGPMYRQQRVSKTLDQNSNTNFAWTAASKYNLNGRKSLANPGIAMATHKDDEERFFPQHGVLVFGQTNATNKTTLDNVLITSEEEIKATNPVATEEYGTVSSNLQSGSTNPTTESVNNQGILPGMVWQDRDVYLQGPIWAKIPHTDGHFHPSPLMGGFGLKHPPPQILIKNTPVPANPPETFTTSKFASYITQYSTGQVSVEIEWELQKENSKRWNPEIQYTSNYAKSNNVEFSVDAAGVYSEPRPIGTRYLTRNL

SEQ ID NO: 83 - protein, 739 aa, Adeno-Associated Virus
  source 1..739: note = BCD_0298
MAADGYLPDWLEDNLSEGIREWWALKPGAPQPKANQQHQDNGRGLVLPGYKYLGPFNGLDKGEPVNEADAAALEHDKAYDKQLEQGDNPYLKYNHADAEFQERLQEDTSFGGNLGRAVFQAKKRILEPLGLVEEAAKTAPGKKRPLEKTPNQPTDTQAAGQTPAKKRPQGEQSGDSARRQLDFDPQPAAPIGQPPAAPSPVGSNTMASGGGGPMADDNQGADGVGNASGNWHCDSTWLGDRVITTSTRTWVLPTYNNRIYKQISSESGATNDNHYFGYSTPWGYFDFNRFHCHFSPRDWQRLINNNWGFRPKRLNFKIFNIQVKEVTQIEGGSTIANNLTSTIQVFADSEYQLPYVLGSAHRGCLPPFPADVFMIPQYGYLTLNNGSQSVGRSSFYCLEYFPSQMLRTGNNFQFSYTFESVPFHSSYAHSQSLDRIMNPLVDQYLYYLARTQTGTGSTTSNTRQLQFYQAGPSNMADQSRNWLPGPMYRQQRVSKTLDQNSNTNFAWTAASKYNLNGRKSLANPGIAMATHKDDEERFFPQHGVLVFGQTNATNKTTLDNVLITSEEEIKATNPVATEEYGTVSSNLQSSTTNPTTESVNNQGILPGMVWQDRDVYLQGPIWAKIPHTDGHFHPSPLMGGFGLKHPPPQILIKNTPVPANPPETFTTSKFASYITQYSTGQVSVEIEWELQKENSKRWNPEIQYTSNYAKSNNVESSVDAAGVYSEPRPIGTRYLTRNL

SEQ ID NO: 84 - protein, 739 aa, Adeno-Associated Virus
  source 1..739: note = BCD_0299
MAADGYLPDWLEDNLSEGIREWWALKPGAPQPKANQQHQDNGRGLVLPGYKYLGPFNGLDKGEPVNEADAAALEHDKAYDKQLEQGDNPYLKYNHADAEFQERLQEDTSFGGNLGRAVFQAKKRILEPLGLVEEAAKTAPGRKRPLEKTPNQPTDTQAAGQTPAKKRQQGEQSGDSARRQLDFDPQPAAPIGQPPAAPSPVGSNTMASGGGGPMADDNQGADGVGNASGNWHCDSTWLGDRVITTSTRTWVLPTYNNHIYKQISSESGATNDNHYFGYSTPWGYFDFNRFHCHFSPRDWQRLINNNWGFRPKRLNFKIFNIQVKEVTQIEGGSTIANNLTSTIQVFADSEYQLPYVLGSAHQGCLPPFPADVFMIPQYGYLTLNNGSQSVGRSSFYCLEYFPSQMLGTGNNFQFSYTFESVPFHSSYAHSQSLDRIMNPLVDQYLYYLARTQTGTGSTTSNTRQLQFYQAGPSNMADQSRNWLPGPMYRQQRVSKTLDQNSNTNFAWTAASKYNLNGRKSLVNPGISMATHKDDEERFFPQHGVLVFGQTNATNKTTLDNVLITDEEEVKATNPVATEEYGTVSSNLQSGSTNPTTETVNNQGILPGMVWQDRDVYLQGPIWAKIPHTDGHFHPSPLMGGFGLKHPPPQILIKNTPVPANPPETFTTSKSASYITQYSTGQVSVEIEWELQKENSKRWNPEIQYTSNYAKSNNVEFSVDAAGVYSEPRPIGTRYLTRNL

SEQ ID NO: 85 - protein, 739 aa, Adeno-Associated Virus
  source 1..739: note = BCD_0300
MAADGYLPDWLEDNLSEGICEWWALKPGAPQPKANQQHQDNGRGLVLPGYKYLGPFNGLDKGEPVNEADAAALEHDKAYDKQLEQGDNPYLKYNHADAEFQERLQEDTSFGGNLGRAVFQAKKRILEPLGLVEEAAKTAPGKKRPLEKTPNQPTDTQAAGQTPAKKRQQGEQSGDSARRQLDFDPQPAAPIGQPPAAPSPVGSNTMASGGGGPMADDNQGADGVGNASGNWHCDSTWLGDRVITTSTRTWVLPTYNNHIYKQISSESGATNDNHYFGYSTPWGYFDFNRFHCHFSPRDWQRLINNNWGFRPKRLNFKIFNIQVKEVTQIEGGSTIANNLTSTIQVFADSEYQLPYVLGSAHQGCLPPFPADVFMIPQYGYLTLNNGSQSVGRSSFYCLEYFPSQMLRTGNNFQFSYTFESVPFHSSYAHSQSLDRIMNPLVDQYLYYLARTQTGTGSTTSNTRQLQFYQAGPSNMADQSRNWLPGPMYRQQRVSKTLDQNSNTNFAWTAASKYNLNGRKSLVNPGIPMATHKDDEERFFPQHGVLVFGQTNATNKTTLDNVLITDEEEVKATNPVATGEYGTVSSNLQSGSTNPTTETVNNQGILPGMVWQDRDVYLQGPIWAKIPHTDGHFHPSPLMGGFGLKHPPPQILIKNTPVPANPPETFTTSKFASYITQYSTGQVSVEIEWELQKENSKRWNPEIQYTSNYAKSNNVEFSVDAAGVYSEPRPIGTRYLTRNL

SEQ ID NO: 86 - protein, 739 aa, Adeno-Associated Virus
  source 1..739: note = BCD_0301
MAADGYLPDWLEDNLSEGIREWWALKPGAPQPKANQQHQDNGRGLVLPGYKHLGPFNGLDKGEPVNKADAAALEHDKAYDKQLEQGDNPYLKYNHADAEFQERLQEDTSFGGNLGRAVFQAKKRILEPLGLVEEAAKTAPGKKRPLEKTPNQPTDTQAAGQTPAKKRQQGEQSGDSARRQLDFDPQPAAPIGQPPAAPSPVGSNTMASGGGGPMADDNQGADGVGNASGNWHCDSTWLGDRVITTSTRTWVLPTYNNHIYKQISSESGATNDNHYFGYSTPWGYFDFNRFHCHFSPRDWQRLINNNWGFRPKRLNFKIFNIQVKEVTQIEGGSTIANNLTSTIQVFADSEYQLPYVLGSAHQGCLPPFPADVFMIPQYGYLTLNNGSQSVGRSSFYCLEYFPSQMLRTGNNFQFSYTFESVPFHSSYAHSQSLDRIMNPLVDQYLYYLARTQTGTGSTTSNTRQLQFYQAGPSNMADQSRNWLPGPMYRQQRVSKTLDQNSNTNFAWTAASKYNLNGRKSLVNPGISMATHKDDEERLFPQHGVLVFGQTNATNKTTLDNVLITDEEEVKATNPVATEEYGTVSSNLQSGSTNPTTETVNNQGILPGMVWQDRDVYLQGPIWAKIPHTDGHFHPSPLMGGFGLKHPPPQILIKNTPVPANPPETFTTSKFASYITQYSTGQVSVEIEWELQKENSKRWNPEIQYTSNYAKSNNVEFSVDAAGVYSEPRPIGTRYLTRNL

SEQ ID NO: 87 - protein, 726 aa, Adeno-Associated Virus
  source 1..726: note = BCD_0351
MSFVDHPPDWLEEVGEGLHEFLELEAGPPKPKPNQQKQDNARGLVLPGYNYLGPFNGLDKGEPVNRADAVAREHDISYNEQLQAGDNPYLKYNHADAEFQEKLKDDTSFGGNLGKAIFQAKKRVLEPFGLVEAPVKTAPAKKRPIEKSPAEPSSSKGIGKAGQQPARKRLNFGQTGDADSAADPQPLGEPPAAPSGLGTGTMASGSGAPMADNNEGADGVGNASGNWHCDSTWLGDRVITTSTRTWALPTYNNHLYKQISSQSGASNDNHYFGYSTPWGYFDFNRFHCHFSPRDWQRLINNNWGFRPKRLNFKLFNIQVKEVTQTDGTKTIANNLTSTVQVFADSEYQLPYVLGSAHQGCFPPFPADVFMVPQYGYLTLNNGSQAMGRSSFYCLEYFPSQMLRTGNNFTFSYTFEDVPFHSSYAHSQSLDRLMNPLIDQYLYYLSKTQNGLGFSQAGPTSMRDQSRNWLPGPCFRQQRISKTPTQNNTGDFAWTGTTRYHLNGRDSVMNPGPAMASHKDDEDRFFPQNGVLIFGKQGAEKNNAVLDKVIITDEEEIRTTNPVATEEYGLVATSLQNNTTTADTERVNAQGILPGMVWQDRDVYLQGPIWAKIPYTDGHFHPSPLMGGFGLKRPPPQILIKNTPVPADPATTFNPAKLASFITQYSTGQVSVEIEWELQKENSKRWNPEVQYTSNYNKSVNVDFTVDTNGMYSEPRTIGTRYLTRNL

SEQ ID NO: 88 - protein, 726 aa, Adeno-Associated Virus
  source 1..726: note = BCD_0353
MSFVDHPPDWLEEVGEGLHEFLELEAGPPKPKPNQQKQDNARGLVLPGYNYLGPFNGLDKGEPVNRADAVAREHDISYNEQLQAGDNPYLKYNHADAEFQEKLKDDTSFGGNLGKAIFQAKKRVLEPFGLVEAPVKTAPAKKRPIEKSPAEPSSSKGIGKAGQQPARKRLNFGQTGDTDSAADPQPLGEPPAAPSGLGTGTMASGGGAPMADNNEGADGVGNASGNWHCDSTWLGDRVITTSTRTWALPTYNNHLYKQISSQSGASNDNHYFGYSTPWGYFDFNRFHCHFSPRDWQRLINNNWGFRPKRLNFKLFNIQVKEVTQTDGTKTIANNLTSTVQVFADSEYQLPYVLGSAHQGCFPPFPADVFMVPQYGYLTLNNGSQAMGRSSFYCLEYFPSQMLRTGNNFTFSYTFEDVPFHSSYAHSQSLDRLMNPLIDQYLYYLSKTQNGLGFSQAGPSSMRDQSRNWLPGPCFRQQRISKTPTQNNTGDFAWTGTTRYHLNGRDSVMNPGPAMASHKDDEDRFFPQNGVLIFGKKDAEKNNAVLDKVIITDEEEIRTTNPVATEEYGLVATSLQNNTTAADTERVNAQGILPGMVWQDRDVYLQGPIWAKIPYTDGHFHPSPLMGGFGLKRPPPQILIKNTPVPADPATTFNPAKLASFITQYSTGQVSVEIEWELQKENSKRWNPEVQYTSNYNKSVNVEFTVDNNGVYSEPRTIGTRYLTRNL

SEQ ID NO: 89 - protein, 727 aa, Adeno-Associated Virus
  source 1..727: note = BCD_0354
MSFVDHPPDWLEEVGEGLHEFLELEAGPPKPKPNQQKQDNARGLVLPGYNYLGPFNGLDKGEPVNRADAVAREHDISYNEQLQAGDNPYLKYNHADAEFQEKLKDDTSFGGNLGKAIFQAKKRVLEPFGLVEAPVKTAPAKKRPIEKSPAEPSSSKGIGKAGQQPARKRLNFGQTGDADSAADPQPLGEPPAAPSGLGTGTMASGSGAPMADNNEGADGVGNASGNWHCDSTWLGDRVITTSTRTWALPTYNNHLYKQISSSSFGATNDDHYFGYSTPWGYFDFNRFHCHFSPRDWQRLINNNWGFRPKRLNFKLFNIQVKEVTDTDGTKTIANNLTSTVQVFADSEYQLPYVLGSAHQGCFPPFPADVFMIPQYGYLTLNNGSQAMGRSSFYCLEYFPSQMLRTGNNFTFSYTFEDVPFHSSYAHSQSLDRLMNPLIDQYLYYLSKTNGGLAFSQAGHTNMRNQSRNWLPGPCFRQQRISKTPTENNNQEFSWTGATKYHLNGRDSVMNPGPAMASHKDDENRFFPQNGVLIFGTPNAAATNAQLGDVLITDEEEIRTTNPVATEEYGIVANNKQSSSIQATTTNVNAQGILPGMVWQDRDVYLQGPIWAKIPHTDGHFHPSPLMGGFGLKHPPPQILIKNTPVPSNPPETFKQEKLNAFITQYSTGQVSVEIEWELQKENSKRWNPEVQYTSNYNKSVNVDFTVDTNGVYSEPRTIGTRYLTRNL

SEQ ID NO: 90 - protein, 727 aa, Adeno-Associated Virus
  source 1..727: note = BCD_0359
MSFVDHPPDWLEEVGEGLHEFLELEAGPPKPKPNQQKQDNARGLVLPGYNYLGPFNGLDKGEPVNRADAVAREHDISYNEQLQAGDNPYLKYNHADAEFQEKLKDDTSFGGNLGKAVFQAKKRVLEPFGLVEAPVKTAPAKKRPIEKSPAEPSSSKGIGKAGQQPARKRLNFGQTGDADSAPDPQPLGEPPAAPSGLGTGTMASGSGAPMADNNEGADGVGNASGNWHCDSTWLGDRVITTSTRTWALPTYNNHLYKQISSSSFGATNDNHYFGYSTPWGYFDFNRFHCHFSPRDWQRLINNNWGFRPKRLNFKLFNIQVKEVTENDGTKTIANNLTSTVQVFADSEYQLPYVLGSAHQGCFPPFPADVFMVPQYGYLTLNNGSQAMGRSSFYCLEYFPSQMLRTGNNFTFSYTFEDVPFHSSYAHSQSLDRLMNPLIDQYLYYLSKTAGGLAFSQAGPTSMRDQSRNWLPGPCFRQQRISKTPTENNNQEFSWTGATKYHLNGRDSVMNPGPAMASHKDDENRFFPQNGVLIFGTPNANATNAQLNDVLITDEEEIRTTNPVATEEYGIVANNKQSSSIQATTTNVNAQGILPGMVWQDRDVYLQGPIWAKIPHTDGHFHPSPLMGGFGLKHPPPQILIKNTPVPSNPPETFKQDKLNAFITQYSTGQVSVEIEWELQKENSKRWNPEVQYTSNYNKSVNVDFTVDTNGVYSEPRTIGTRYLTRNL

SEQ ID NO: 91 - protein, 728 aa, Adeno-Associated Virus
  source 1..728: note = BCD_0360
MSFVDHPPDWLEEVGEGLHEFLELEAGPPKPKPNQQKQDNARGLVLPGYNYLGPFNGLDKGEPVNRADAVAREHDISYNEQLQAGDNPYLKYNHADAEFQEKLKDDTSFGGNLGKAIFQAKKRVLEPFGLVEAPVKTAPAKKRPIEKSPAEPSSSKGIGKAGQQPARKRLNFGQTGDTDSAADPQPLGEPPAAPSGLGTGTMASGSGAPMADNNEGADGVGNASGNWHCDSTWLGDRVITTSTRTWALPTYNNHLYKQISSQTGGGANNDNHYFGYSTPWGYFDFNRFHCHFSPRDWQRLINNNWGFRPKRLNFKLFNIQVKEVTENEGTKTIANNLTSTVQVFADSEYQLPYVLGSAHQGCFPPFPADVFMIPQYGYLTLNNGSQAMGRSSFYCLEYFPSQMLRTGNNFTFSYTFEDVPFHSSYAHSQSLDRLMNPLIDQYLYYLSKTQNGLGFSQAGPSSMRDQSRNWLPGPCFRQQRISKTSTENNNGEFSWTGATKYHLNGRDSVMNPGPAMASHKDDEDRFFPQNGVLIFGKQGSNASNVQLDKVLITDEEEIRTTNPVATEEYGFVATSLQNGNTTADTTRVNAQGILPGMVWQDRDVYLQGPIWAKIPYTDGHFHPSPLMGGFGLKRPPPQILIKNTPVPGDPPTTFNQQKLASFITQYSTGQVSVEIEWELQKENSKRWNPEVQYTSNYNKSVNVDFTVNSDGVYSEPRTIGTRYLTRNL

SEQ ID NO: 92 - protein, 727 aa, Adeno-Associated Virus
  source 1..727: note = BCD_0361
MSFVDHPPDWLEEVGEGLHEFLELEAGPPKPKPNQQKQDNARGLVLPGYNYLGPFNGLDKGEPVNRADAVAREHDISYNEQLQAGDNPYLKYNHADAEFQEKLKDDTSFGGNLGKAVFQAKKRVLEPFGLVEAPVKTAPAKKRPIEKSPAEPSSSKGIGKAGQQPARKRLNFGQTGDADSAPDPQPLGEPPAAPSGLGTGTMASGSGAPMADNNEGADGVGNASGNWHCDSTWLGDRVITTSTRTWALPTYNNHLYKQISSSNYGANNDNHYFGYSTPWGYFDFNRFHCHFSPRDWQRLINNNWGFRPKRLNFKLFNIQVKEVTETDGTKTIANNLTSTVQVFADSEYQLPYVLGSAHQGCFPPFPADVFMIPQYGYLTLNNGSQAMGRSSFYCLEYFPSQMLRTGNNFTFSYTFEDVPFHSSYAHSQSLDRLMNPLIDQYLYYLSKTAGGLAFSQAGPTSMRNQSRNWLPGPCFRQQRVSERSTENNNGDFSWTGTTRYHLNGRDSAMNPGPAMASHKDDEDRFFPQNGVLIFGTPNATASNAPLDNVLITDEEEIRTTNPVATEEYGIVANNKQDNSTQATTAIVNAQGILPGMVWQDRDVYLQGPIWAKIPHTDGHFHPSPLMGGFGLKHPPPQILIKNTPVPSNPPEKFTQEKLNAFITQYSTGQVSVEIEWELQKENSKRWNPEVQYTSNYNKSVNVDFTVDTNGMYSEPRTIGTRYLTRNL

SEQ ID NO: 93 - protein, 727 aa, Adeno-Associated Virus
  source 1..727: note = BCD_0362
MSFVDHPPDWLEEVGEGLHEFLELEAGPPKPKPNQQKQDNARGLVLPGYNYLGPFNGLDKGEPVNRADAVAREHDISYNEQLQAGDNPYLKYNHADAEFQEKLKDDTSFGGNLGKAIFQAKKRVLEPFGLVEAPVKTAPAKKRPIEKSPAEPSSSKGIGKAGQQPARKRLNFGQTGDTDSAADPQPLGEPPAAPSGLGTGTMASGSGAPMADNNEGADGVGNASGNWHCDSTWLGDRVITTSTRTWALPTYNNHLYKQISSSQAGASNDNHYFGYSTPWGYFDFNRFHCHFSPRDWQRLINNNWGFRPKRLNFKLFNIQVKEVTDTEGTKTIANNLTSTVQVFADSEYQLPYVLGSAHQGCFPPFPADVFMIPQYGYLTLNNGSQAMGRSSFYCLEYFPSQMLRTGNNFTFSYTFEDVPFHSSYAHSQSLDRLMNPLIDQYLYYLSKTNGGLGFSQAGPSSMRDQSRNWLPGPCFRQQRISTVPTQNNNGDFSWTGATKYHLNGRNSAMNPGPAMASHKDDEHRFFPQNGVLIFGKQGAEKNNAILDKVIITDEEEVRTTNPVATEEYGFVATSLQSSTEAAETARVNAQGILPGMVWQDRDVYLQGPIWAKIPHTDGHFHPSPLMGGFGLKRPPPQILIKNTPVPSDPPLTFNPAKLASFITQYSTGQVSVEIEWELQKENSKRWNPEVQYTSNYNKSVNVEFTVDNNGVYSEPRTIGTRYLTRNL

SEQ ID NO: 94 - protein, 736 aa, Adeno-Associated Virus
  source 1..736: note = BCD_0386
MAADGYLPDWLEDNLSEGIREWWDLKPGAPKPKANQQKQDDGRGLVLPGYKYLGPFNGLDKGEPVNAADAAALEHDKAYDQQLKAGDNPYLRYNHADAEFQERLQEDTSFGGNLGRAVFQAKKRVLEPLGLVEEGAKTAPGKKRPVEQSPQEPDSSSGIGKTGQQPAKKRLNFGQTGDSESVPDPQPLGEPPAAPSGVGSNTMASGGGAPMADNNEGADGVGNSSGNWHCDSTWLGDRVITTSTRTWALPTYNNHLYKQISNSTSGGSSNDNTYFGYSTPWGYFDFNRFHCHFSPRDWQRLINNNWGFRPKRLNFKLFNIQVKEVTDNNGVKTIANNLTSTVQVFTDSEYQLPYVLGSAHQGCLPPFPADVFMIPQYGYLTLNDGSQAVGRSSFYCLEYFPSQMLRTGNNFQFSYTFEDVPFHSSYAHSQSLDRLMNPLIDQYLYFLSRTQTTGTAGTQTLQFSQAGPSSMANQARNWVPGPCYRQQRVSTTVTQNNNSEFAWPGATKYHLNGRDSLMNPGVAMASHKEGEDRFFPLSGVLIFGKQGTGRDNVDADKVMITNEEEIKTTNPVATEEYGAVATNHQSAQAQAQTGLVHNQGVLPGMVWQNRDVYLQGPIWAKIPHTDGNFHPSPLMGGFGLKHPPPQILIKNTPVPADPPTTFNQAKLNSFITQYSTGQVSVEIEWELQKENSKRWNPEIQYTSNYYKSNNVEFAVNTEGVYSEPRPIGTRFLTRNL

SEQ ID NO: 95 - protein, 727 aa, Adeno-Associated Virus
  source 1..727: note = BCD_0389
MSFVDHPPDWLEEVGEGLHEFLELEAGPPKPKPNQQKQDNARGLVLPGYNYLGPFNGLDKGDPVNRADAVAREHDISYNEQLQAGDNPYLKYNHADAEFQEKLKDDTSFGGNLGKAIFQAKKRVLEPFGLVEALVKTAPAKKRPIEKSPAEPSSSKGIGKAGQQPARKRLNFGQTGDADSAPDPQPLGEPPAAPSGLGTGTMASGSGAPMADNNEGADGVGNASGNWHCDSTWLGDRVITTSTRTWALPTYNNHLYKQISSSNYGANNDNHYFGYSTPWGYFDFNRFHCHFSPRDWQRLINNNWGFRPKRLNFKLFNIQVKEVTETEGTKTIANNLTSTVQVFADSEYQLPYVLGSAHQGCFPPFPADVFMIPQYGYLTLNNGSHAMGRSSFYCLEYFPSQMLRTGNNFTFSYTFEDVPFHSSYAHSQSLDRLMNPLIDQYLYYLSKTQNGLGFSQAGPTSMRNQSRNWLPGPCFRQQRVSERSTENNNGDFSWTGATKYHLNGRNSAMNPGPAMASHKDDEDRFFPQNGVLIFGTPNATASNTPLENVLITDEEEIRTTNPVATEEYGIVANNKQDGSTQATTAIVNAQGILPGMVWQDRDVYLQGPIWAKIPHTDGHFHPSPLMGGFGLKHPPPQILIKNTPVPSNPPEKFTQEKLNAFITQYSTGQVSVEIEWELQKENSKRWNPEVQYTSNYNKSVNVDFTVDTNGMYSEPRTIGTRYLTRNL

SEQ ID NO: 96 - protein, 727 aa, Adeno-Associated Virus
  source 1..727: note = BCD_0390
MSFVDHPPDWLEEVGEGLHEFLELEAGPPKPKPNQQKQDNARGLVLPGYNYLGPFNGLDKGEPVNRADAVAREHDISYNEQLQAGDNPYLKYNHADAEFQEKLKDDTSFGGNLGKAIFQAKKRVLEPFGLVEAPVKTAPAKKRPIEKSPAEPSSSKGIGKAGQQPARKRLNFGQTGDTDSAADPQPLGEPPAAPSGLGTGTMASGGGAPMADNNEGADGVGNASGNWHCDSTWLGDRVITTSTRTWALPTYNNHLYKQISSSSFGATNDDHYFGYSTPWGYFDFNRFHCHFSPRDWQRLINNNWGFRPKRLNFKLFNIQVKEVTDTDGTKTIANNLTSTVQVFADSEYQLPYVLGSAHQGCFPPFPADVFMIPQYGYLTLNNGSQAMGRSSFYCLEYFPSQMLRTGNNFTFSYTFEDVPFHSSYAHSQSLDRLMNPLIDQYLYYLSKTNGGLAFSQAGHTNMRNQSRNWLPGPCFRQQRISKTPTENNNQEFSWTGATKYHLNGRDSVMNPGPAMASHKDDENRFFPQNGVLIFGTPNANATNAQLNDVLITDEEEIRTTNPVATEEYGIVANNKQSSSTQATTTNVNAQGILPGMVWQDRDVYLQGPIWAKIPHTDGHFHPSPLMGGFGLKHPPPQILIKNTPVPSNPPETFKQEKLNAFITQYSTGQVSVEIEWELQKENSKRWNPEVQYTSNYNKSVNVDFTVDTNGVYSEPRTIGTRYLTRNL

SEQ ID NO: 97 - protein, 728 aa, Adeno-Associated Virus
  source 1..728: note = BCD_0391
MSFVDHPPDWLEEVGEGLHEFLELEAGPPKPKPNQQKQDNARGLVLPGYNYLGPFNGLDKGEPVNRADAVAREHDISYNEQLQAGDNPYLKYNHADAEFQEKLKDDTSFGGNLGKAIFQAKKRVLEPFGLVEAPVKTAPAKKRPIEKSPVEPSSSKGIGKAGQQPARKRLNFGQTGDADSAADPQPLGEPPAAPSGLGTGTMASGGGAPMADNNEGADGVGNASGNWHCDSTWLGDRVITTSTRTWALPTYNNHLYKQISSSSGSGATNDNHYFGYSTPWGYFDFNRFHCHFSPRDWQRLINNNWGFRPKRLNFKLFNIQVKEVTETDGTKTIANNLTSTVQVFADSEYQLPYVLGSAHQGCFPPFPADVFMVPQYGYLTLNNGSQAMGRSSFYCLEYFPSQMLRTGNNFTFSYTFEDVPFHSSYAHSQSLDRLMNPLIDQYLYYLSKTQNGLAFSQAGPSSMRNQSRNWLPGPCFRQQRISKTSTENNNGEFSWTGATKYHLNGRDSVMNPGPAMASHKDDEHRFFPQNGVLIFGKQGADKTNAILDKVIVTDEEEIRATNPVATEEYGFVATTLQNGQTAADTTRVNAQGILPGMVWQDRDVYLQGPIWAKIPYTDGHFHPSPLMGGFGLKHPPPQILIKNTPVPSNPPDTFNPEKLNSFITQYSTGQVSVEIEWELQKENSKRWNPEVQYTSNYDKSVNVDFTVNGDGVYSEPRTIGTRYLTRNL

SEQ ID NO: 98 - protein, 727 aa, Adeno-Associated Virus
  source 1..727: note = BCD_0392
MSFVDHPPDWLEEVGEGLHEFLELEAGPPKPKPNQQKQDNARGLVLPGYNYLGPFNGLDKGEPVNRADAVAREHDISYNEQLQAGDNPYLKYNHADAEFQEKLKDDTSFGGNLGKAIFQAKKRVLEPFGLVEAPVKTAPAKKRPIEKSPAEPSSSKGIGKAGQQPARKRLNFGQTGDTDSAADPQPLGEPPAAPSGLGTGTMASGGGAPMADNNEGADGVGNASGNWHCDSTWLGDRVITTSTRTWALPTYNNHLYKQISSSNYGANNDNHYFGYSTPWGYFDFNRFHCHFSPRDWQRLINNNWGFRPKRLNFKLFNIQVKEVTETDGTKTIANNLTSTVQVFADSEYQLPYVLGSAHQGCFPPFPADVFMIPQYGYLTLNNGSHAMGRSSFYCLEYFPSQMLRTGNNFTFSYTFEDVPFHSSYAHSQSLDRLMNPLIDQYLYYLSKTQNGLGFSQAGPTSMRNQSRNWLPGPCFRQQRVSERSTENNNGDFSWTGTTKYHLNGRDSAMNPGPAMASHKDDEDRFFPQNGVLIFGTPNANATNAPLENVLITDEEEIRTTNPVATEEYGIVANNKQDSSTQATTAIVNAQGILPGMVWQDRDVYLQGPIWAKIPHTDGHFHPSPLMGGFGLKHPPPQILIKNTPVPSNPPEKFTQEKLNAFITQYSTGQVSVEIEWELQKENSKRWNPEVQYTSNYNKSVNVDFTVDTNGMYSEPRTIGTRYLTRNL

SEQ ID NO: 99 - protein, 727 aa, Adeno-Associated Virus
  source 1..727: note = BCD_0393
MSFVDHPPDWLEEVGEGLHEFLELEAGPPKPKPNQQKQDNARGLVLPGYNYLGPFNGLDKGEPVNRADAVAREHDISYNEQLQAGDNPYLKYNHADAEFQEKLKDDTSFGGNLGKAIFQAKKRVLEPFGLVEAPVKTAPAKKRPIEKSPAEPSSSKGIGKAGQQPARKRLNFGQTGDTDSAADPQPLGEPPAAPSGLGTGTMASGSGAPMADNNEGADGVGNASGNWHCDSTWLGDRVITTSTRTWALPTYNNHLYKQISSSQAGANNDNHYFGYSTPWGYFDFNRFHCHFSPRDWQRLINNNWGFRPKRLNFKLFNIQVKEVTDTDGTKTIANNLTSTVQVFADSEYQLPYVLGSAHQGCFPPFPADVFMVPQYGYLTLNNGSQAMGRSSFYCLEYFPSQMLRTGNNFTFSYTFEDVPFHSSYAHSQSLDRLMNPLIDQYLYYLSKTNGGLGFSQAGPNSMRDQSRNWLPGPCFRQQRISTVPTQNNNGDFSWAGATKYHLNGRNSAMNPGPAMASHKDDEHRFFPQNGVLIFGKQGAEKNNAILDKVIITDEEEIRTTNPVATEEYGFVATSLQSPTEAAETARVNAQGILPGMVWQDRDVYLQGPIWAKIPHTDGHFHPSPLMGGFGLKHPPPQILIKNTPVPSNPPETFTQEKLNAFITQYSTGQVSVEIEWELQKENSKRWNPEVQYTSNYNKSVNVDFTVDTNGVYSEPRTIGTRYLTRNL

SEQ ID NO: 100 - protein, 727 aa, Adeno-Associated Virus
  source 1..727: note = BCD_0394
MSFVDHPPDWLEEVGEGLHEFLELEAGPPKPKPNQQKQDNARGLVLPGYNYLGPFNGLDKGEPVNRADAVAREHDISYNEQLQAGDNPYLKYNHADAEFQEKLKDDTSFGGNLGKAIFQAKKRVLEPFGLVEAPVKTAPAKKRPIEKSPAEPSSSKGIGKAGQQPARKRLNFGQTGDTDSAADPQPLGEPPAAPSGLGTGTMASGGGAPMADNNEGADGVGNASGNWHCDSTWLGDRVITTSTRTWALPTYNNHLYKQISSSQAGANNDNHYFGYSTPWGYFDFNRFHCHFSPRDWQRLINNNWGFRPKRLNFKLFNIQVKEVTDTDGTKTIANNLTSTVQVFADSEYQLPYVLGSAHQGCFPPFPADVFMVPQYGYLTLNNGSQAMGRSSFYCLEYFPSQMLRTGNNFTFSYTFEDVPFHSSYAHSQSLDRLMNPLIDQYLYYLSKTNGGLGFSQAGPNSMRDQSRNWLPGPCFRQQRISTVPTQNNNGDFSWAGATKYHLNGRNSAMNPGPAMASHKDDEHRFFPQNGVLIFGKQGAEKNNAILDKVIITDEEEIRTTNPVATEEYGFVATSLQSPTEAAETARVNAQGILPGMVWQDRDVYLQGPIWAKIPHTDGHFHPSPLMGGFGLKHPPPQILIKNTPVPSNPPETFTQEKLNAFITQYSTGQVSVEIEWELQKENSKRWNPEVQYTSNYNKSVNVDFTVDTNGVYSEPRTIGTRYLTRNL

SEQ ID NO: 101 - protein, 727 aa, Adeno-Associated Virus
  source 1..727: note = BCD_0395
MSFVDHPPDWLEEVGEGLHEFLELEAGPPKPKPNQQKQDNARGLVLPGYNYLGPFNGLDKGEPVNRADAVAREHDISYNEQLQAGDNPYLKYNHADAEFQEKLKDDTSFGGNLGKAIFQAKKRVLEPFGLVEAPVKTAPAKKRPIEKSPAEPSSSKGIGKAGQQPARKRLNFGQTGDADSAADPQPLGEPPAAPSGLGTGTMASGSGAPMADNNEGADGVGNASGNWHCDSTWLGDRVITTSTRTWALPTYNNHLYKQISSSQAGANNDNHYFGYSTPWGYFDFNRFHCHFSPRDWQRLINNNWGFRPKRLNFKLFNIQVKEVTDTDGTKTIANNLTSTVQVFADSEYQLPYVLGSAHQGCFPPFPADVFMVPQYGYLTLNNGSQAMGRSSFYCLEYFPSQMLRTGNNFTFSYTFEDVPFHSSYAHSQSLDRLMNPLIDQYLYYLSKTNGGLGFSQAGPNSMRDQSRNWLPGPCFRQQRISTVPTQNNNGDFSWAGATKYHLNGRNSAMNPGPAMASHKDDEHRFFPQNGVLIFGKQGAEKNNAILDKVIITDEEEIRTTNPVATEEYGFVSTSLQSPTEAAETARVNAQGILPGMVWQDRDVYLQGPIWAKIPHTDGHFHPSPLMGGFGLKHPPPQILIKNTPVPSNPPETFTQEKLNAFITQYSTGQVSVEIEWELQKENSKRWNPEVQYTSNYNKSVNVDFTVDTNGVYSEPRTIGTRYLTRNL

SEQ ID NO: 102 - protein, 727 aa, Adeno-Associated Virus
  source 1..727: note = BCD_0396
MSFVDHPPDWLEEVGEGLHEFLELEAGPPKPKPNQQKQDNARGLVLPGYNYLGPFNGLDKGEPVNRADAVAREHDISYNEQLQAGDNPYLKYNHADAEFQEKLKDDTSFGGNLGKAIFQAKKRVLEPFGLVEAPVKTAPAKKRPIEKSPAEPSSSKGIGKAGQQPARKRLNFGQTGDTDSAADPQPLGEPPAAPSGLGTGTMASGGGAPMADNNEGADGVGNASGNWHCDSTWLGDRVITTSTRTWALPTYNNHLYKQISSSSFGATNDNHYFGYSTPWGYFDFNRFHCHFSPRDWQRLINNNWGFRPKRLNFKLFNIQVKEVTENDGTKTIANNLTSTVQVFADSEYQLPYVLGSAHQGCFPPFPADVFMVPQYGYLTLNNGSQAMGRSSFYCLEYFPSQMLRTGNNFTFSYTFEDVPFHSSYAHSQSLDRLMNPLIDQYLYYLSKTAGGLAFSQAGPTSMRDQSRNWLPGPCFRQQRISKTPTENNNQEFSWTGATKYHLNGRDSVMNPGPAMASHKDDENRFFPQNGVLIFGTPNANATNAQLNDVLITDEEEIRTTNPVATEEYGIVANNKQSSSTQATTTNVNAQGILPGMVWQDRDVYLQGPIWAKIPHTDGHFHPSPLMGGFGLKHPPPQILIKNTPVPSNPPETFKQEKLNAFITQYSTGQVSVEIEWELQKENSKRWNPEVQYTSNYNKSVNVDFTVDTNGVYSEPRTIGTRYLTRNL

SEQ ID NO: 103 - protein, 727 aa, Adeno-Associated Virus
  source 1..727: note = BCD_0413
MSFVDHPPDWLEEVGEGLHEFLELEAGPPKPKPNQQKQDNARGLVLPGYNYLGPFNGLDKGEPVNRADAVAREHDISYNEQLQAGDNPYLKYNHADAEFQEKLKDDTSFGGNLGKAIFQAKKRVLEPFGLVEAPVKTAPAKKRPIEKSPAEPSSSKGIGKAGQQPARKRLNFGQTGDTDSVADPQPLGEPPAAPSGLGTGTMASGSGAPMADNNEGADGVGNASGNWHCDSTWLGDRVITTSTRTWALPTYNNHLYKQISSGNYGANNDNHYFGYSTPWGYFDFNRFHCHFSPRDWQRLINNNWGFRPKRLNFKLFNIQVKEVTDTDGTKTIANNLTSTVQVFADSEYQLPYVLGSAHQGCFPPFPADVFMIPQYGYLTLNNGSQAMGRSSFYCLEYFPSQMLRTGNNFTFSYTFEDVPFHSSYAHSQSLDRLMNPLIDQYLYYLSKTNGGLAFSQAGHTNMRNQSRNWLPGPCFRQQRISKTPTENNNQEFSWTGATKYHLNGRDSVMNPGPAMASHKDDENRFFPQNGVLIFGTSNANATNAQLNDVLITDEEEIRTTNPVATEEYGIVANNKQSSSTQATTTNVNAQGILPGMVWQDRDVYLQGPIWAKIPHTDGHFHPSPLMGGFGLKHPPPQILIKNTPVPSNPPETFNPAKLNAFITQYSTGQVSVEIEWELQKENSKRWNPEVQYTSNYNKSVNVDFTVDTNGVYSEPRTIGTRYLTRNL

SEQ ID NO: 104 - protein, 726 aa, Adeno-Associated Virus
  source 1..726: note = BCD_0414
MSFVDHPPDWLEEVGEGLHEFLELEAGPPKPKPNQQKQDNARGLVLPGYNYLGPFNGLDKGEPVNRADAVAREHDISYNEQLQAGDNPYLKYNHADAEFQEKLKDDTSFGGNLGKAIFQAKKRVLEPFGLVEEPVKTAPAKKRPIEKSPAEPSSSKGIGKAGQQPARKRLNFGQTGDTDSAADPQPLGEPPAAPSGLGTGTMASGGGAPMADNNEGADGVGNASGNWHCDSTWLGDRVITTSTRTWALPTYNNHLYKQISSQSGANNDNHYFGYSTPWGYFDFNRFHCHFSPRDWQRLINNNWGFRPKRLNFKLFNIQVKEVTQTDGTKTIANNLTSTVQVFADSEYQLPYVLGSAHQGCFPPFPADVFMVPQYGYLTLNNGSQAMGRSSFYCLEYFPSQMLRTGNNFTFSYTFEDVPFHSSYAHSQSLDRLMNPLIDQYLYYLSKTQNGLGFSQAGPSSMRDQSRNWLPGPCFRQQRISKTPTQNNTGDFAWTGTTRYHLNGRDSVMNPGPAMASHKDDEDRFFPQNGVLIFGKKDAEKNNAVLDKVIITDEEEIRTTNPVATEEYGLVATSLQNNTTTADTERVNAQGILPGMVWQDRDVYLQGPIWAKIPYTDGHFHPSPLMGGFGLKRPPPQILIKNTPVPADPATTFNPAKLASFITQYSTGQVSVEIEWELQKENSKRWNPEVQYTSNYNKSVNVEFTVDNNGVYSEPRTIGTRYLTRNL

SEQ ID NO: 105 - protein, 726 aa, Adeno-Associated Virus
  source 1..726: note = BCD_0415
MSFVDHPPDWLEEVGEGLHEFLELEAGPPKPKPNQQKQDNARGLVLPGYNYLGPFNGLDKGEPVNRADAVAREHDISYNEQLQAGDNPYLKYNHADAEFQEKLKDDTSFGGNLGKAIFQAKKRVLEPFGLVEAPVKTAPAKKRPIEKSPAEPSSSKGIGKAGQQPARKRLNFGQTGDTDSAADPQPLGEPPAAPSGLGTGTMASGGGAPMADNNEGADGVGNASGNWHCDSTWLGDRVITTSTRTWALPTYNNHLYKQISSQSGATNDNHYFGYSTPWGYFDFNRFHCHFSPRDWQRLINNNWGFRPKRLNFKLFNIQVKEVTETEGTKTIANNLTSTVQVFADSEYQLPYVLGSAHQGCFPPFPADVFMIPQYGYLTLNNGSQAMGRSSFYCLEYFPSQMLRTGNNFTFSYTFEDVPFHSSYAHSQSLDRLMNPLIDQYLYYLSKTQNGLAFSQAGPNSMRDQSRKWLPGPCFRQQRISKTSTQNNNNEFAWTGATKYHLNGRNSAMNPGPAMATHKDDEHRFFPQNGVLIFGKQGAEKNNAILDKVIITDEEEIRATNPVSTEEYGVVATNLQNGNTQATTNDVNAQGILPGMVWQDRDVYLQGPIWAKIPHTDGHFHPSPLMGGFGLKHPPPQILIKNTPVPSDPPLTFNQQKLASFITQYSTGQVSVEIEWELQKENSKRWNPEVQYTSNYDKSVNVDFTVNGDGVYSEPRTIGTRYLTRNL

SEQ ID NO: 106 - protein, 736 aa, Adeno-Associated Virus
  source 1..736: note = BCD_0441
MAADGYLPDWLEDNLSEGIREWWDLKPGAPKPKANQQKQDDGRGLVLPGYKYLGPFNGLDKGEPVNEADAAALEHDKAYDQQLKAGDNPYLRYNHADAEFQERLQEDTSFGGNLGRAVFQAKKRVLEPLGLVEEGAKTAPGKKRPVEQSPQEPDSSSGIGKTGQQPAKKRLNFGQTGDSESVPDPQPIGEPPAAPSGLGSNTMASGGGAPMADNNEGADGVGNSSGNWHCDSTWLGDRVITTSTRTWALPTYNNHLYKQISSASTGASNDNHYFGYSTPWGYFDFNRFHCHFSPRDWQRLINNNWGFRPKRLNFKLFNIQVKEVTTNDGVTTIANNLTSTVQVFSDSEYQLPYVLGSAHQGCLPPFPADVFMIPQYGYLTLNNGSQAVGRSSFYCLEYFPSQMLRTGNNFTFSYTFEDVPFHSSYAHSQSLDRLMNPLIDQYLYYLNRTQNQSGSAQNKDLLFSRGSPAGMSVQPKNWLPGPCYRQQRVSKTKTDNNNSNFTWTSASKYNLNGRESIINPGTAMASHKDDEDKFFPMSGVMIFGKESAGASNTALDNVMITDEEEIKATNPVATERFGTVAVNLQSSSTDPVTGDVHVMGVLPGMVWQDRDVYLQGPIWAKIPHTDGHFHPSPLMGGFGLKHPPPQILIKNTPVPANPPAEFSATKFASFITQYSTGQVSVEIEWELQKENSKRWNPEVQYTSNYAKSANVDFTVDNNGLYTEPRPIGTRYLTRPL

SEQ ID NO: 107 - protein, 736 aa, Adeno-Associated Virus
  source 1..736: note = BCD_0442
MAADGYLPDWLEDNLSEGIREWWNLKPGAPKPKANQQKQDNGRGLVLPGYKYLGPFNGLDKGEPVNAADAAALEHDKAYDQQLQAGDNPYLRYNHADAEFQERLQEDTSFGGNLGRAVFQAKKRVLEPFGLVEEGAKTAPGKKRPVEQSPQEPDSSSGIGKSGQQPAKKRLNFGQTGDSESVPDPQPLGEPPATPAAVGPTTMASGGGAPMADNNEGADGVGNASGNWHCDSTWLGDRVITTSTRTWALPTYNNHLYKQISSASTGASNDNHYFGYSTPWGYFDFNRFHCHFSPRDWQRLINNNWGFRPKRLNFKLFNIQVKEVTTNDGVTTIANNLTSTVQVFSDSEYQLPYVLGSAHQGCLPPFPADVFMIPQYGYLTLNNGSQAVGRSSFYCLEYFPSQMLRTGNNFTFSYTFEDVPFHSSYAHSQSLDRLMNPLIDQYLYYLNRTQNQSGSAQNKDLLFSRGSPAGMSVQPKNWLPGPCYRQQRVSKTKTDNNNSNFTWTSASKYNLNGRESIINPGTAMASHKDDEDKFFPMSGVMIFGKESAGASNTALDNVMITDEEEIKATNPVATERFGTVAVNLQSSSTDPVTGDVHVMGALPGMVWQDRDVYLQGPIWAKIPHTDGHFHPSPLMGGFGLKHPPPQILIKNTPVPANPPAEFSATKFASFITQYSTGQVSVEIEWELQKENSKRWNPEVQYTSNYAKSANVDFTVDNNGLYTEPRPIGTRYLTRPL

SEQ ID NO: 108 - protein, 726 aa, Adeno-Associated Virus
  source 1..726: note = BCD_0443
MSFVDHPPDWLEEVGEGLHEFLELEAGPPKPKPNQQKQDNARGLVLPGYNYLGPFNGLDKGEPVNRADAVAREHDISYNEQLQAGDNPYLKYNHADAEFQEKLKDDTSFGGNLGKAIFQAKKRVLEPFGLVEAPVKTAPAKKRPVEKSPAEPGSSSGIGKAGHQPARKRLNFGQTGDADSAADPQPLGEPPAAPSGLGTGTMASGGGAPMADNNEGADGVGNASGNWHCDSTWLGDRVITTSTRTWALPTYNNHLYKQISSQSGASNDNHYFGYSTPWGYFDFNRFHCHFSPRDWQRLINNNWGFRPKRLNFKLFNIQVKEVTQTDGTKTIANNLTSTVQVFADSEYQLPYVLGSAHQGCFPPFPADVFMVPQYGYLTLNNGSQAMGRSSFYCLEYFPSQMLRTGNNFTFSYTFEDVPFHSSYAHSQSLDRLMNPLIDQYLYYLSKTQNGLGFSQAGPSNMRDQSRNWLPGPCFRQQRISKTPTQNNTGDFAWTGTTRYHLNGRDSVMNPGPAMASHKDDEDRFFPQNGVLIFGKQDAEKNNAVLDKVIITDEEEIRTTNPVATEEYGLVATSLQNNTTAADTERVNAQGILPGMVWQDRDVYLQGPIWAKIPYTDGHFHPSPLMGGFGLKRPPPQILIKNTPVPADPATTFNPAKLASFITQYSTGQVSVEIEWELQKENSKRWNPEVQYTSNYNKSVNVDFTVDTNGMYSEPRTIGTRYLTRNL

SEQ ID NO: 109 - protein, 739 aa, Adeno-Associated Virus
  source 1..739: note = BCD_0446
MAADGYLPDWLEDNLSEGIREWWDLKPGAPKPKANQQKQDDGRGLVLPGYKYLGPFNGLDKGEPVNAADAAALEHDKAYDQQLKAGDNPYLRYNHADAEFQERLQEDTSFGGNLGRAVFQAKKRVLEPLGLVEEGAKTAPGKKRPLEKTPNQPTDTQAAGQTPAKKRPQGEQSGDSARRQLDFDPQPAAPLGQPPAAPSPVGSNTMASGGGGPMADDNQGADGVGNASGNWHCDSTWLGDRVITTSTRTWVLPTYNNHIYKQISSETGATNDNHYFGYSTPWGYFDFNRFHCHFSPRDWQRLINNNWGFRPKRLNFKIFNIQVKEVTQIEGGSTIANNLTSTIQVFADSEYQLPYVLGSAHQGCLPPFPADVFMIPQYGYLTLNNGSQSVGRSSFYCLEYFPSQMLRTGNNFSFSYTFESVPFHSSYAHSQSLDRIMNPLVDQYLYYLARTQTGTGSTTSNTRQLQFYQAGPSNMADQSRNWLPGPTYRQQRVSKTLDQNSNTNFAWTAASKYNLNGRKSLTNPGIAMATHKDDEERFFPQHGVLVFGKTNATNKTTLEHVLVTSEEEIKATNPVATEEYGTVSSNLQSSAAGPQTQTVNNQGVLPGMVWQDRDVYLQGPIWAKIPHTDGHFHPSPLMGGFGLKHPPPQILIKNTPVPANPPETFTTSKFASYITQYSTGQVSVEIEWELQKENSKRWNPEIQYTSNYAKSNNVEFSVDAAGVYSEPRPIGTRYLTRNL

SEQ ID NO: 110 - protein, 735 aa, Adeno-Associated Virus
  source 1..735: note = BCD_0447
MAADGYLPDWLEDTLSEGIRQWWKLKPGPPPPKPAERHKDDSRGLVLPGYKYLGPFNGLDKGEPVNEADAAALEHDKAYDRQLDSGDNPYLKYNHADAEFQERLKEDTSFGGNLGRAVFQAKKRVLEPLGLVEEPVKTAPGKKRPVEHSPAEPDSSSGTGKSGQQPARKRLNFGQTGDADSVPDPQPLGQPPAAPSGLGTNTMATGSGAPMADNNEGADGVGNSSGNWHCDSTWMGDRVITTSTRTWALPTYNNHLYKQISSQSGASNDNHYFGYSTPWGYFDFNRFHCHFSPRDWQRLINNNWGFRPKRLSFKLFNIQVKEVTQNDGTTTIANNLTSTVQVFTDSEYQLPYVLGSAHQGCLPPFPADVFMVPQYGYLTLNNGSQAVGRSSFYCLEYFPSQMLRTGNNFTFSYTFEDVPFHSSYAHSQSLDRLMNPLIDQYLYYLSKTNAPSGTTTMSRLQFSQAGASDIRDQSRNWLPGPCYRQQRVSKTAADNNNSDYSWTGATKYHLNGRDSLVNPGPAMASHKDDEEKYFPQSGVLIFGKQDSGKTNVDIEKVMITDEEEIRTTNPVATEQYGAVSTNLQSGNTQAATSDVNTQGVLPGMVWQDRDVYLQGPIWAKIPHTDGHFHPSPLMGGFGLKHPPPQILIKNTPVPANPSTTFSAAKFASFITQYSTGQVSVEIEWELQKENSKRWNPEIQYTSNYNKSVNVDFTVDTNGVYSEPRPIGTRYLTRNL

SEQ ID NO: 111 - protein, 738 aa, Adeno-Associated Virus
  source 1..738: note = BCD_0448
MAADGYLPDWLEDNLSEGIREWWDLKPGAPKPKANQQKQDNGRGLVLPGYKYLGPFNGLDKGEPVNAADAAALEHDKAYDQQLKAGDNPYLRYNHADAEFQERLQEDTSFGGNLGRAVFQAKKRVLEPLGLVEEGAKTAPGKKRPLEKTPNQPTDTQAAGQTPAKKRPQGEQSGDSARRQLDFDPQPAAPLGQPPAAPSPVGSNTMASGGGGPMADDNQGADGVGNASGNWHCDSTWLGDRVITTSTRTWALPTYNNHLYKQISSQSGATNDNHFFGYSTPWGYFDFNRFHCHFSPRDWQRLINNNWGFRPRKLRFKLFNIQVKEVTQNEGTKTIANNLTSTIQVFTDSEYQLPYVLGSAHQGCLPPFPADVFMIPQYGYLTLNNGSQAVGRSSFYCLEYFPSQMLRTGNNFEFSYQFEDVPFHSSYAHSQSLDRLMNPLIDQYLYYLSRTQSTGGTTGTQKLLFSQAGPNNMSAQAKNWLPGPCYRQQRVSTTTNQNNNSNFAWTGATKYHLNGRDSLVNPGVAMATHKDDEERFFPSSGVLMFGKQGAGKDNVDYSSVMLTSEEEIKTTNPVATEEYGVVADNLQQQNVAPIVGAVNSQGALPGMVWQNRDVYLQGPIWAKIPHTDGNFHPSPLMGGFGLKHPPPQILIKNTPVPADPPTTFNQAKLASFITQYSTGQVSVEIEWELQKENSKRWNPEIQYTSNYYKSTNVDFAVNTEGTYSEPRPIGTRYLTRNL

SEQ ID NO: 112 - protein, 738 aa, Adeno-Associated Virus; identical to SEQ ID NO: 21
  source 1..738: note = BCD_0449

SEQ ID NO: 113 - protein, 738 aa, Adeno-Associated Virus
  source 1..738: note = BCD_0450
MAADGYLPDWLEDNLSEGIREWWNLKPGAPKPKANQQKQDHGRGLVLPGYKYLGPFNGLDKGEPVNEADAAALEHDKAYDQQLKAGDNPYLRYNHADAEFQERLQEDTSFGGNLGRAVFQAKKRVLEPLGLVESPVKTAPGKKRPVEPSPQRSPDSSTGIGKKGQQPAKKRLNFGQTGDSESVPDPQPIGEPPAGPSGLGSGTMAAGGGAPMADNNEGADGVGSSSGNWHCDSTWLGDRVITTSTRTWALPTYNNHLYKQISNGTSGGSTNDNTYFGYSTPWGYFDFNRFHCHFSPRDWQRLINNNWGFRPKRLNFKLFNIQVKEVTQNEGTKTIANNLTSTIQVFTDSEYQLPYVLGSAHQGCLPPFPADVFMIPQYGYLTLNNGSQAVGRSSFYCLEYFPSQMLRTGNNFEFSYQFEDVPFHSSYAHSQSLDRLMNPLIDQYLYYLSRTQSTGGTAGTQQLLFSQAGPNNMSAQAKNWLPGPMYRQQRVSTTLSQNNNSNFAWTGATKYHLNGRDSLVNPGVAMATHKDDEERFFPSSGVLMFGKQGAGKDNVAYSSVMLTSEEEIKTTNPVATEQYGVVADNLQQQNVAPIVGAVNSQGALPGMVWQNRDVYLQGPIWAKIPHTDGNFHPSPLMGGFGLKHPPPQILIKNTPVPADPPTTFSQAKLASFITQYSTGQVSVEIEWELQKENSKRWNPEIQYTSNYYKSTNVDFAVNTDGNYSEPRPIGTRYLTRNL

SEQ ID NO: 114 - protein, 736 aa, Adeno-Associated Virus
  source 1..736: note = BCD_0454
MAADGYLPDWLEDNLSEGIREWWDLKPGAPKPKANQQKQDDGRGLVLPGYKYLGPFNGLNRGEPVNAADAAALEHDKAYDQQLKAGDNPYLRYNHADAEFQERLQEDTSFGGNLGRAVFQAKKRVLEPFGLVEEGAKTAPGKKRPVEQSPQEPDSSSGIGKSGQQPAKKRLNFGQTGDSESVPDPQPLGEPPATPAAVGPTTMASGGGAPMADNNEGADGVGNASGNWHCDSTWLGDRVITTSTRTWVLPTYNNHIYKQISSDTGATNDNHYFGYSTPWGYFDFNRFHCHFSPRDWQRLINNNWGFRPKRLNFKIFNIQVKEVTQIEGGSTIANNLTSTIQVFADSEYQLPYVLGSAHQGCLPPFPADVFMIPQYGYLTLNNGSQSVGRSSFYCLEYFPSQMLRTGNNFSFSYTFESVPFHSSYAHSQSLDRIMNPLVDQYLYYLARTQTGTGSTTSNTKQLQFYQAGPSNMADQSRNWLPGPTYRQQRVSKTLDQNSNTNFAWTAASKYNLNGRKSLTNPGIAMATHKDDEERFFPQHGVLVFGKTDATNKTTLENVLVTSEEEIKATNPVATEEYGTVSSNLQSNATNPTTESVNNQGVLPGMVWQDRDVYLQGPIWAKIPHTDGHFHPSPLMGGFGLKHPPPQILIKNTPVPANPPETFTTSKFASYITQYSTGQVSVEIEWELQKENSKRWNPEIQYTSNYAKSNNVEFSVNAAGVYSEPRPIGTRYLTRNL

SEQ ID NO: 115 - protein, 739 aa, Adeno-Associated Virus
  source 1..739: note = BCD_0455
MAADGYLPDWLEDNLSEGIREWWNLKPGAPKPKANQQKQDNGRGLVLPGYKYLGPFNGLDKGEPVNAADAAALEHDKAYDQQLKAGDNPYLRYNHADAEFQERLQEDTSFGGNLGRAVFQAKKRVLEPLGLVEEGAKTAPGKKRPLEKTPNQPTDTQAAGQTPAKKRPQGEQSGDSARRQLDFDPQPAAPLGQPPAAPSPVGSNTMASGGGGPMADDNQGADGVGNASGNWHCDSTWLGDRVITTSTRTWVLPTYNNHIYKQISSETGATNDNHYFGYSTPWGYFDFNRFHCHFSPRDWQRLINNNWGFRPKRLNFKIFNIQVKEVTQIEGGSTIANNLTSTIQVFADSEYQLPYVLGSAHQGCLPPFPADVFMIPQYGYLTLNNGSQSVGRSSFYCLEYFPSQMLRTGNNFSFSYTFESVPFHSSYAHSQSLDRIMNPLVDQYLYYLARTQTGTGSTTSNTRQLQFYQAGPSNMADQSRNWLPGPTYRQQRVSKTLDQNSNTNFAWTAASKYNLNGRKSLTNPGIAMATHKDDEERFFPQHGVLVFGKTNATNKTTLENVLVTSEEEIKATNPVATEEYGTVSSNLQSNTTNPTTESVNNQGVLPGMVWQDRDVYLQGPIWAKIPHTDGHFHPSPLMGGFGLKHPPPQILIKNTPVPANPPETFTTSKFASYITQYSTGQVSVEIEWELQKENSKRWNPEIQYTSNYAKSNNVEFSVDAAGVYSEPRPIGTRYLTRNL

SEQ ID NO: 116 - protein, 726 aa, Adeno-Associated Virus
  source 1..726: note = BCD_0459
MSFVDHPPDWLEEVGEGLHEFLELEAGPPKPKPNQQKQDNARGLVLPGYNYLGPFNGLDKGEPVNRADEVAREHDISYNEQLQAGDNPYLKYNHADAEFQEKLKDDTSFGGNLGKAIFQAKKRVLEPFGLVEAPVKTAPAKKRPIEKSPAEPSSSKGIGKAGQQPARKRLNFGQTGDTDSAADPQPLGEPPAAPSGLGTGTMASGGGAPMADNNEGADGVGNASGNWHCDSTWLGDRVITTSTRTWALPTYNNHLYKQISSQSGASNDNHYFGYSTPWGYFDFNRFHCHFSPRDWQRLINNNWGFRPKRLNFKLFNIQVKEVTQTDGTKTIANNLTSTVQVFADSEYQLPYVLGSAHQGCFPPFPADVFMVPQYGYLTLNNGSHAMGRSSFYCLEYFPSQMLRTGNNFTFSYTFEDVPFHSSYAHSQSLDRLMNPLIDQYLYYLSKTQNGLGFSQAGPTSMRDQSRNWLPGPCFRQQRISKTPTQNNTGDFAWTGTTRYHLNGRDSVMNPGPAMASHKDDEDRFFPQNGVLIFGKQDAEKNNAVLDKVIITDEEEIRTTNPVATEEYGLVATSLQNNTTAADTERVNAQGILPGMVWQDRDVYLQGPIWAKIPYTDGHFHPSPLMGGFGLKRPPPQILIKNTPVPADPATTFNPAKLASFITQYSTGQVSVEIEWELQKENSKRWNPEVQYTSNYNKSVNVDFTVDTNGMYSEPRTIGTRYLTRNL

SEQ ID NO: 117 - protein, 727 aa, Adeno-Associated Virus
  source 1..727: note = BCD_0461
MSFVDHPPDWLEEVGEGLHEFLELEAGPPKPKPNQQKQDNARGLVLPGYNYLGPFNGLDKGEPVNRADEVAREHDISYNEQLQAGDNPYLKYNHADAEFQEKLKDDTSFGGNIGKAIFQAKKRVLEPFGLVEAPVKTAPAKKRPIEKSPAEPSSSKGIGKAGQQPARKRLNFGQTGDTDSAADPQPLGEPPAAPSGLGTGTMASGGGAPMADNNEGADGVGNASGNWHCDSTWLGDRVITTSTRTWALPTYNNHLYKQISSSNYGANNDNHYFGYSTPWGYFDFNRFHCHFSPRDWQRLINNNWGFRPKRLNFKLFNIQVKEVTETEGTKTIANNLTSTVQVFADSEYQLPYVLGSAHQGCFPPFPADVFMIPQYGYLTLNNGSQAMGRSSFYCLEYFPSQMLRTGNNFTFSYTFEDVPFHSSYAHSQSLDRLMNPLIDQYLYYLSKTAGGLAFSQAGPTTMRNQSRNWLPGPCFRQQRVSERSTENNNGDFSWTGTTRYHLNGRDSAMNPGPAMASHKDDEDRFFPQNGVLIFGTPNATASNAPLDNVLITDEEEIRTTNPVATEEYGIVANNKQDSSTQATTAIVNAQGILPGMVWQDRDVYLQGPIWAKIPHTDGHFHPSPLMGGFGLKHPPPQILIKNTPVPSNPPEKFTQEKLNAFITQYSTGQVSVEIEWELQKENSKRWNPEVQYTSNYNKSVNVDFTVDTNGMYSEPRTIGTRYLTRNL

SEQ ID NO: 118 - protein, 727 aa, Adeno-Associated Virus
  source 1..727: note = BCD_0462
MSFVDHPPDWLEEVGEGLHEFLELEAGPPKPKPNQQKQDNARGLVLPGYNYLGPFNGLDKGEPVNRADEVAREHDISYNEQLQAGDNPYLKYNHADAEFQEKLKDDTSFGGNLGKAIFQAKKRVLEPFGLVEAPVKTAPAKKRPIEKSPAEPSSSKGIGKAGQQPARKRLNFGQTGDTDSAADPQPLGEPPAAPSGLGTGTMASGGGAPMADNNEGADGVGNASGNWHCDSTWLGDRVITTSTRTWALPTYNNHLYKQISSSSFGATNDDHYFGYSTPWGYFDFNRFHCHFSPRDWQRLINNNWGFRPKRLNFKLFNIQVKEVTDTDGTKTIANNLTSTVQVFADSEYQLPYVLGSAHQGCFPPFPADVFMIPQYGYLTLNNGSQAMGRSSFYCLEYFPSQMLRTGNNFTFSYTFEDVPFHSSYAHSQSLDRLMNPLIDQYLYYLSKTNGGLAFSQAGHTNMRNQSRNWLPGPCFRQQRISKTPTENNNQEFSWTGATKYHLNGRDSVMNPGPAMASHKDDENRFFPQNGVLIFGTPNANATNAQLNDVLITDEEEIRTTNPVATEEYGIVANNKQSSSTQATTTNVNAQGILPGMVWQDRDVYLQGPIWAKIPHTDGHFHPSPLMGGFGLKHPPPQILIKNTPVPSNPPETFKQEKLNAFITQYSTGQVSVEIEWELQKENSKRWNPEVQYTSNYNKSVNVDFTVDTNGVYSEPRTIGTRYLTRNL

SEQ ID NO: 119 - protein, 726 aa, Adeno-Associated Virus
  source 1..726: note = BCD_0466
MSFVDHPPDWLEEVGEGLHEFLELEAGPPKPKPNQQKQDNARGLVLPGYNYLGPFNGLDKGEPVNRADEVAREHDISYNEQLQAGDNPYLKYNHADAEFQEKLKDDTSFGGNLGKAIFQAKKRVLEPFGLVEAPVKTAPAKKRPIEKSPAEPSSSKGIGKAGQQPARKRLNFGQTGDTDSAADPQPLGEPPAAPSGLGTGTMASGGGAPMADNNEGADGVGNASGNWHCDSTWLGDRVITTSTRTWALPTYNNHLYKQISSQSGANNDNHYFGYSTPWGYFDFNRFHCHFSPRDWQRLINNNWGFRPKRLNFKLFNIQVKEVTENEGTKTIANNLTSTVQVFADSEYQLPYVLGSAHQGCFPPFPADVFMVPQYGYLTLNNGSHAMGRSSFYCLEYFPSQMLRTGNNFTFSYTFEDVPFHSSYAHSQSLDRLMNPLIDQYLYYLSKTQNGLAFSQAGPNSMRDQSRNWLPGPCFRQQRISKTSTQNNNNEFAWTGATKYHLNGRNSAMNPGPAMASHKDDEHRFFPQNGVLIFGKQGADKTNAILDKVIVTDEEEIRATNPVATEEYGVVATNLQNGNTQATTNDVNAQGILPGMVWQDRDVYLQGPIWAKIPHTDGHFHPSPLMGGFGLKHPPPQILIKNTPVPSNPPDTFNPEKLNSFITQYSTGQVSVEIEWELQKENSKRWNPEVQYTSNYDKSVNVDFTVNGDGVYSEPRTIGTRYLTRNL

SEQ ID NO: 120 - protein, 727 aa, Adeno-Associated Virus
  source 1..727: note = BCD_0467
MSFVDHPPDWLEEVGEGLHEFLELEAGPPKPKPNQQKQDNARGLVLPGYNYLGPFNGLDKGEPVNRADEVAREHDISYNEQLQAGDNPYLKYNHADAEFQEKLKDDTSFGGNLGKAIFQAKKRVLEPFGLVEAPVKTAPAKKRPIEKSPAEPSSSKGIGKAGQQPARKRLNFGQTGDTDSAADPQPLGEPPAAPSGLGTGTMASGGGAPMADNNEGADGVGNASGNWHCDSTWLGDRVITTSTRTWALPTYNNHLYKQISSSSFGATNDDHYFGYSTPWGYFDFNRFHCHFSPRDWQRLINNNWGFRPKRLNFKLFNIQVKEVTENEGTKTIANNLTSTVQVFADSEYQLPYVLGSAHQGCFPPFPADVFMVPQYGYLTLNNGSHAMGRSSFYCLEYFPSQMLRTGNNFTFSYTFEDVPFHSSYAHSQSLDRLMNPLIDQYLYYLSKTNGGLAFSQAGHTNMRNQSRNWLPGPCFRQQRISKTPTENNNQEFSWTGATKYHLNGRDSVMNPGPAMASHKDDEDRFFPQNGVLIFGTQNAAATNALLNDVLITDEEEIRTTNPVATEEYGIVANNKQSSSIQATTTNVNAQGILPGMVWQDRDVYLQGPIWAKIPHTDGHFHPSPLMGGFGLKHPPPQILIKNTPVPSNPPETFKQEKLNAFITQYSTGQVSVEIEWELQKENSKRWNPEVQYTSNYNKSVNVDFTVDTNGVYSEPRTIGTRYLTRNL

SEQ ID NO: 121 - protein, 726 aa, Adeno-Associated Virus
  source 1..726: note = BCD_0468
MSFVDHPPDWLEEVGEGLHEFLELEAGPPKPKPNQQKQDNARGLVLPGYNYLGPFNGLDKGEPVNRADEVAREHDISYNEQLQAGDNPYLKYNHADAEFQEKLKDDTSFGGNLGKAIFQAKKRVLEPFGLVEAPVKTAPAKKRPIEKSPAEPSSSKGIGKAGQQPARKRLNFGQTGDTDSAADPQPLGEPPAAPSGLGTGTMASGGGAPMADNNEGADGVGNASGNWHCDSTWLGDRVITTSTRTWALPTYNNHLYKQISSQSGANNDNHYFGYSTPWGYFDFNRFHCHFSPRDWQRLINNNWGFRPKRLNFKLFNIQVKEVTENEGTKTIANNLTSTVQVFADSEYQLPYVLGSAHQGCFPPFPADVFMVPQYGYLTLNNGSHAMGRSSFYCLEYFPSQMLRTGNNFTFSYTFEDVPFHSSYAHSQSLDRLMNPLIDQYLYYLSKTQNGLAFSQAGPNSMRDQSRNWLPGPCFRQQRISKTPTENNNQEFSWTGATKYHLNGRDSVMNPGPAMASHKDDENRFFPQNGVLIFGTPNANATNAQLNDVLITDEEEIRTTNPVATEEYGIVANNKQSSSTQATTTNVNAQGILPGMVWQDRDVYLQGPIWAKIPHTDGHFHPSPLMGGFGLKHPPPQILIKNTPVPSNPPETFKQEKLNAFITQYSTGQVSVEIEWELQKENSKRWNPEVQYTSNYNKSVNVDFTVDTNGVYSEPRTIGTRYLTRNL

SEQ ID NO: 122 - protein, 734 aa, Adeno-Associated Virus
  source 1..734: note = BCD_0485
MAADGYLPDWLEDNLSEGIREWWALKPGAPKPKANQQKQDDGRGLVLPGYKYLGPFNGLDKGEPVNAADAAALEHDKAYDQQLQAGDNPYLRYNHADAEFQERLQEDTSFGGNLGRAVFQAKKRVLEPLGLVEEGAKTAPGKKRPVEPSPQRSPDSSTGIGKKGPQPARKRLNFGQTGDSESAPDPQPLGEPPAAPSSVGPVTMAAGGGAPMADNNEGADGVGNASGNWHCDSTWLGDRVITTSTRTWALPTYNNHLYKQISSSSSGATNDNHYFGYSTPWGYFDFNRFHCHFSPRDWQRLINNNWGFRPKRLNFKLFNIQVKEVTTNDGVTTIANNLTSTVQVFSDSEYQLPYVLGSAHQGCLPPFPADVFMIPQYGYLTLNNGSQSVGRSSFYCLEYFPSQMLRTGNNFQFSYTFEDVPFHSSYAHSQSLDRLMNPLIDQYLYYLARTQSTTGSTRELQFHQAGPNTMAEQAKNWLPGPCYRQQRVSKVLDQNPNSNFAWTAATKYHLNGRDSLANPGIAMATNKDDEDRFFPINGTIIFGKTGASNKTTLENVLMTSEEEIRPTNPVATEEYGVVSSNLQASNTNPTSQTVNNQGALPGMVWQNRDVYLQGPIWAKIPHTDGNFHPSPLMGGFGLKHPPPQILIKNTPVPANPPEVFTPSKFASFITQYSTGQVSVEIEWELQKENSKRWNPEIQYTSNFDKSNSVDFSVDAQGVYSEPRPIGTRYLTRNL

SEQ ID NO: 123 - protein, 738 aa, Adeno-Associated Virus
  source 1..738: note = BCD_0486
MAADGYLPDWLEDNLSEGIREWWALKPGAPKPKANQQKQDNGRGLVLPGYKYLGPFNGLDKGEPVNAADAAALEHDKAYDQQLQAGDNPYLRYNHADAEFQERLQEDTSFGGNLGRAVFQAKKRVLEPLGLVEEGAKTAPGKKRPVEPSPQRSPDSSTGIGKKGPQPARKRLNFGQTGDSESAPDPQPLGEPPAAPSGVGSNTMAAGGGAPMADNNEGADGVGSSSGNWHCDSTWLGDRVITTSTRTWALPTYNNHLYKQISNGTSGGATNDNTYFGYSTPWGYFDFNRFHCHFSPRDWQRLINNNWGFRPKRLNFKLFNIQVKEVTQNEGTKTIANNLTSTIQVFTDSEYQLPYVLGSAHQGCLPPFPADVFMIPQYGYLTLNNGSQAVGRSSFYCLEYFPSQMLRTGNNFQFSYTFEDVPFHSSYAHSQSLDRLMNPLIDQYLYYLSRTQTTGGTANTQTLGFSQGGPNTMANQAKNWLPGPCYRQQRVSTTTGQNNNSNFAWTAGTKYHLNGRNSLANPGIAMATHKDDEERFFPSNGILIFGKQNAARDNADYSDVMLTSEEEIKTTNPVATEEYGIVADNLQQQNTAPQTGTVNSQGALPGMVWQNRDVYLQGPIWAKIPHTDGNFHPSPLMGGFGLKHPPPQILIKNTPVPADPPTTFNQAKLNSFITQYSTGQVSVEIEWELQKENSKRWNPEIQYTSNYYKSTNVDFAVNTEGVYSEPRPIGTRYLTRNL

SEQ ID NO: 124 - protein, 738 aa, Adeno-Associated Virus
  source 1..738: note = BCD_0487
MAADGYLPDWLEDNLSEGIREWWALKPGAPKPKANQQKQDDGRGLVLPGYKYLGPFNGLDKGEPVNAADAAALEHDKAYDQQLQAGDNPYLRYNHADAEFQERLQEDTSFGGNLGRAVFQAKKRVLEPLGLVEEGAKTAPGKKRPVEPSPQRSPDSSTGIGKKGPQPARKRLNFGQTGDSESAPDPQPLGEPPAAPSGVGSNTMAAGGGAPMADNNEGADGVGSSSGNWHCDSTWLGDRVITTSTRTWALPTYNNHLYKQISNGTSGGATNDNTYFGYSTPWGYFDFNRFHCHFSPRDWQRLINNNWGFRPKRLNFKLFNIQVKEVTQNEGTKTIANNLTSTIQVFTDSEYQLPYVLGSAHQGCLPPFPADVFMIPQYGYLTLNNGSQAVGRSSFYCLEYFPSQMLRTGNNFQFSYTFEDVPFHSSYAHSQSLDRLMNPLIDQYLYYLSRTQTTGGTANTQTLGFSQGGPNTMANQAKNWLPGPCYRQQRVSTTTGQNNNSNFAWTAGTKYHLNGRNSLANPGIAMATHKDDEERFFPSNGILIFGKQNAARDNADYSDVMLTSEEEIKTTNPVATEEYGIVADNLQQQNTAPQTGTVNSQGALPGMVWQNRDVYLQGPIWAKIPHTDGNFHPSPLMGGFGLKHPPPQILIKNTPVPADPPTTFNQAKLNSFITQYSTGQVSVEIEWELQKENSKRWNPEIQYTSNYYKSTNVDFAVNTEGVYSEPRPIGTRYLTRNL

SEQ ID NO: 125 - protein, 738 aa, Adeno-Associated Virus
  source 1..738: note = BCD_0488
MAADGYLPDWLEDNLSEGIREWWALKPGAPKPKANQQKQDNGRGLVLPGYKYLGPFNGLDKGEPVNAADAAALEHDKAYDQQLQAGDNPYLRYNHADAEFQERLQEDTSFGGNLGRAVFQAKKRVLEPLGLVEEGAKTAPGKKRPVEPSPQRSPDSSTGIGKKGPQPARKRLNFGQTGDSESAPDPQPLGEPPAAPSGVGSNTMAAGGGAPMADNNEGADGVGSSSGNWHCDSTWLGDRVITTSTRTWALPTYNNHLYKQISNGTSGGATNDNTYFGYSTPWGYFDFNRFHCHFSPRDWQRLINNNWGFRPKRLNFKLFNIQVKEVTQNEGTKTIANNLTSTIQVFTDSEYQLPYVLGSAHQGCLPPFPADVFMIPQYGYLTLNNGSQAVGRSSFYCLEYFPSQMLRTGNNFQFSYTFEDVPFHSSYAHSQSLDRLMNPLIDQYLYYLSRTQTTGGTANTQTLGFSQGGPNTMANQAKNWLPGPCYRQQRVSTTTGQNNNSNFAWTAGTKYHLNGRNSLANPGIAMATHKDDEERFFPSNGILIFGKQNAARDNADYSDVMLTSEEEIKTTNPVATEEYGIVADNLQQQNTAPQTGTVNSQGALPGMVWQNRDVYLQGPIWAKIPHTDGNFHPSPLMGGFGLKHPPPQILIKNTPVPADPPTTFNQAKLNSFITQYSTGQVSVEIEWELQKENSKRWNPEIQYTSNFDKSNSVDFSVDAQGVYSEPRPIGTRYLTRNL

SEQ ID NO: 126 - protein, 729 aa, Adeno-Associated Virus
  source 1..729: note = BCD_0489
MAADGYLPDWLEDNLSEGIREWWALKPGAPKPKANQQKQDDGRGLVLPGYKYLGPFNGLDKGEPVNAADAAALEHDKAYDQQLQAGDNPYLRYNHADAEFQERLQEDTSFGGNLGRAVFQAKKRVLEPLGLVEEGAKTAPGKKRPIESPDSSSGIGKKGQQPAKKKLNFGQTGESESVPEPQPLGEPPAAPSSVGPVTMAAGGGAPMADNNEGADGVGNASGNWHCDSTWLGDRVITTSTRTWALPTYNNHLYKQISSSSSGATNDNHYFGYSTPWGYFDFNRFHCHFSPRDWQRLINNNWGFRPKRLNFKLFNIQVKEVTTNDGVTTIANNLTSTVQVFSDSEYQLPYVLGSAHQGCLPPFPADVFMIPQYGYLTLNNGSQSVGRSSFYCLEYFPSQMLRTGNNFQFSYTFEDVPFHSSYAHSQSLDRLMNPLIDQYLYYLARTQSTTGSTRELQFHQAGPNTMAEQAKNWLPGPCYRQQRVSKVLDQNPNSNFAWTAATKYHLNGRDSLANPGIAMATNKDDEDRFFPINGTIIFGKTGASNKTTLENVLMTSEEEIRPTNPVATEEYGVVSSNLQASNTNPTSQTVNNQGALPGMVWQNRDVYLQGPIWAKIPHTDGNFHPSPLMGGFGLKHPPPQILIKNTPVPANPPEVFTPSKFASFITQYSTGQVSVEIEWELQKENSKRWNPEIQYTSNFDKSNSVDFSVDAQGVYSEPRPIGTRYLTRNL

SEQ ID NO: 127 - protein, 727 aa, Adeno-Associated Virus
  source 1..727: note = BCD_0492
MSFVDHPPDWLEEVGEGLHEFLELEAGPPKPKPNQQKQDNARGLVLPGYNYLGPFNGLDKGEPVNRADAVAREHDISYNEQLQAGDNPYLKYNHADAEFQEKLADDTSFGGNLGKAIFQAKKRVLEPFGLVEAPVKTAPAKKRPIEKSPAEPSSSKGIGKAGQQPARKRLNFGQTGDTDSAPDPQPLGEPPAAPSGLGTGTMASGGGAPMADNNEGADGVGNASGNWHCDSTWLGDRVITTSTRTWALPTYNNHLYKQISSSSFGATNDDHYFGYSTPWGYFDFNRFHCHFSPRDWQRLINNNWGFRPKRLNFKLFNIQVKEVTDTDGTKTIANNLTSTVQVFADSEYQLPYVLGSAHQGCFPPFPADVFMIPQYGYLTLNNGSQAMGRSSFYCLEYFPSQMLRTGNNFTFSYTFEDVPFHSSYAHSQSLDRLMNPLIDQYLYYLSKTNGGLAFSQAGHTNMRNQSRNWLPGPCFRQQRISKTPTENNNQEFSWTGATKYHLNGRDSVMNPGPAMASHKDDENRFFPQNGVLIFGTPNANATNTQLNDVLITDEEEIRTTNPVATEEYGIVANNKQSSSTQATTTNVNAQGILPGMVWQDRDVYLQGPIWAKIPHTDGHFHPSPLMGGFGLKHPPPQILIKNTPVPSNPPETFKQDKLNAFITQYSTGQVSVEIEWELQKENSKRWNPEVQYTSNYNKSVNVDFTVDTNGVYSEPRTIGTRYLTRNL

SEQ ID NO: 128 - protein, 737 aa, Adeno-Associated Virus
  source 1..737: note = BMN_0208
MAADGYLPDWLEDNLSEGIREWWALKPGAPKPKANQQKQDDGRGLVLPGYKYLGPFNGLDKGEPVNAADAAALEHDKAYDQQLQAGDNPYLRYNHADAEFQERLQEDTSFGGNLGRAVFQAKKRVLEPLGLVEEGAKTAPGKKRPVEQSPQEPDSSSGIGKKGQQPAKKRLNFGQTGDSESVPDPQPLGEPPAAPSSLGLNTMAAGGGAPMADNNEGADGVGSSSGNWHCDSTRLGDRVITTSTRTWALPTYNNHLYKQISNGTSGGSTNDNTYFGYSTPWGYFDFNRFHCHFSPRDWQRLINNNWGFRPKKLSFKLFNIQVKEVTQNEGTKTIANNLTSTIQVFTDSEYQLSYVLGSAHQGCLPPFPADVFMIPQYGYLTLNNGSQAVGRSSFYCLEYFPSQMLRTGNNFSFSYTFEDVPFHSSYAHSQSLDRLMNPLIDQYLYYLSRTQSTGGTAGTQQLLFSQAGPNNMSAQAKNWLPGPMYRQQRVSTTLSQNNNSNFAWTGGTKYHLNGRDSLVNPGVAMATNKDDEDRFFPSSGVLMFGKQGAGKDNVDYSSVMLTSEEEIKTTNPVATEQYGVVADNLQQQNTAPIVGAVNSQEALPGMVWQNRDVYLQGPIWAKIPHTDGNFHPSPLMGGFGLKHPPPQILIKNTPVPADPPTAFNQAKLNSFITQYSTGQVSVEIEWELQKENSKRWNPEIQYTSNYYKSTNVDFAVDTEGVYSEHRPIGTRYLTRNL

SEQ ID NO: 129 - protein, 737 aa, Adeno-Associated Virus
  source 1..737: note = BMN_0209
MAADGYLPDWLEDNLSEGIREWWALKPGAPKPKANQQKQDDGRGLVLPGYKYLGPFNGLDKGEPVNAADAAALEHDKAYDQQLQAGDNPYLRYNHADAEFQERLQEDTSFGGNLGRAVFQAKKRVLEPLGLVEEGAKTAPGKKRPVEQSPQEPDSSSGIGKKGQQPAKKRLNFGQTGDSESVPDPQPLGEPPAAPSSLGLNTMAAGGGAPMADNNEGADGVGSSSGNWHCDSTWLGDRVITTSTRTWALPTYNNHLYKQISNGTSGGSTNDNTYFGYSTPWGYFDFNRFHCHFSPRDWQRLINNNWGFRPKKLSFKLFNIQVKEVTQNEGTKTIANNLTSTIQVFTDSEYQLPYVPGSAHQGCLPPFPADVFMIPQYGYLTLNNGSQAVGRSSFYCLEYFPSQMLRTGNNFSFSYTFEDVPFHSSYAHSQSLDRLMNPLIDQYLYYLSRTQSTGGTAGTQQLLFSQAGPNNMSAQAKNWLPGPMYRQQRVSTTLSQNNNSNFAWTGGTKYHLNGRDSLVNPGVAMATNKDDEDRFFPSSGVLMFGKQGAGKDNVDYSSVMLTSEEEIKTTNPVATEQYGVVADNLQQQNTAPIVGAVNSQGALPGMVWQNRDVYPQGPIWAKIPHTDGNFHPSPLMGGFGLKHPPPQILIKNTPVPADPPTAFNQAKLNSFITQYSTGQVSVEIEWELQKENSKRWNPEIQYTSNYYKSTNVDFAVNTEGVYSEPRPIGTRYLTRNL

SEQ ID NO: 130 - protein, 737 aa, Adeno-Associated Virus
  source 1..737: note = BMN_0210
MAADGYLPDWLEDNLSEGIREWWALKPGAPKPKANQQKQDDGRGLVLPGYKYLGPFNGLDKGEPVNAADAAALEHDKAYDQQLQAGDNPYLRYNHADAEFQERLQEDTSFGGNLGRAVFQAKKRVLEPPGLVEEGAKTAPGKKRPVEQSPQEPDSSSGIGKKGQQPAKKRLNFGQTGDSESVPDPQPLGEPPAAPSSLGLNTMAAGGGAPMADNNEGADGVGSSSGNWHCDSTWLGDRVITTSTRTWALPTYNNHLYKQISNGTSGGSTNDNTYFGYSTPWGYFDFNRFHCHFSPRDWQRLINNNWGFRPKKLSFKLFNIQVKEVTQNEGTKTIANNLTSTIQVFTDSEYQLPYVLGSAHQGCLPPFPADVFMIPQYGYLTLNNGSQAVGRSFFYCLEYFPSQMLRTGNNFSFSYTFEDVPFHSSYAHSQSLDRLMNPLIDQYLYYLSRTQSTGGTAGTQQLLFSQAGPNNMSAQAKNWLPGPMYRQQRVSTTLSQNNNSNFAWTGGTKYHLNGRDSLVNPGVAMATNKDDEDRFFPSSGVLMFGKQGAGKDNVDYSSVMLTSEEEIKTTNPVATEQYGVVADNLQQQNTAPIVGAVNSQGALPGMVWQNRDVYLQGPIWAKIPHTDGNFHPSPLMGGFGLKHPPPQILIKNTPVPADPPTAFNQAKLNSFITQYSTGQVSVEIERELQKENSKRWNPEIQYTSNYYKSTNVDFAVNTEGVYSEPRPIGTRYLTRNL

SEQ ID NO: 131 - protein, 737 aa, Adeno-Associated Virus
  source 1..737: note = BMN_0211
MAADGYLPDWLEDNLSEGIREWWALKPGAPKPKANQQKQDDGRGLVLPGYKYLGPFNGLDKGEPVNAADAAALEHDKAYDQQLQAGDNPYLRYNHADAEFQERLQEDTSFGGNLGRAVFQAKKRVLEPLGLVEEGAKTAPGKERPVEQSPQEPDSSSGIGKKGQQPAKKRLNFGQTGDSESVPDPQPLGEPPAAPSSLGLNTMAAGGGAPMADNNEGADGVGSSSGNWHCDSTWLGDRVITTSTRTWALPTYNNHLYKQISNGTSGGSTNDNTYFGYSTPWGYFDFNRFHCHFSPRDWQRLINNNWGFRPKKLSFKLFNIQVKEVTQNEGTKTIANNLTSTIQVFTDSEYQLPYVLGSAHQGCLPPFPADVFMIPQYGYLTLNNGSQAVGRSSFYCLEYFPSQMLRTGNNFSFSYTFEDVPFHSSYAHSQSLDRLMNPLIDQYLYYLSRTQSTGGTAGTQQLLFSQAGPNNMSAQAKNWLPGPMYRQQRVSTTLSQNNNSNFAWTGGTKYHLNGRDSLVNPGVAMATNKDDEDRFFPSSAVLMFGKQGAGKDNVDYSSVMLTSEEEIKTTNPVTTEQYGVVADNLQQQNTAPIVGAVNSQGALPGMVWQNRDVYLQGPIWAKIPHTDGNFHPSPLMGGFGLKHPPPQILIKNTPVPADPPTAFNQAKLNSFITQYSTGQVSVEIEWELQKENSKRWNPEIQYTSNYYKSTNVDFAVNTESVYSEPRPIGTRYLTRNL

SEQ ID NO: 132 - protein, 737 aa, Adeno-Associated Virus
  source 1..737: note = BMN_0212
MAADGYLPDWLEDNLSEGIREWWALKPGAPKPKANQQKQDDGRGLVLPGYKYLGPFNGPDKGEPVNAADAAALEHDKAYDQQLQAGDNPYLRYNHADAEFQERLQEDTSFGGNLGRAVFQAKKRVLEPLGLVEEGAKTAPGKKRPVEQSPQEPDSSSGIGKKGQQPAKKRLNFGQTGDSESVPDPQPLGEPPAAPSSLGLNTMAAGGGAPMADNNEGADGVGSSSGNWHCDSTWLGDRVITTSTRTWALPTYNNHLYKQISNGTSGGSTNDNTYFGYSTPWGYFDFNRSHCHFSPRDWQRLINNNWGFRPKKLSFKLFNIQVKEVTQNEGTKTIANNLTSTIQVFTDSEYQLPYVLGSAHQGCLPPFPADVFMIPQYGYLTLNNGSQAVGRSSFYCLEYFPSQMLRTGNNFSFSYTFEDVPFHSSYAHSQSLDRLMNPLIDQYLYYLSRTQSTGGTAGTQQLLFSQAGPNNMSAQAKNWLPGPMYRQQRVSTTLSQNNNSNFAWTGGTKYHLNGRDSLVNPGVAMATNKDDEDRFFPSSGVLMFGKQGAGKDNVDYSSVMLTSEEEIRTTNPVATEQYGVVADNLQQQNTAPIVGAVNSQGALPGMVWQNRDVYLQGPIWAKIPHTDGNFHPSPLMGGFGLKHPPPQILIKNTPVPADPPTAFNQAKLNSFITQYSTGQVSVEIEWELQKENSKRWNPEIQYTSNYYKSTNVDFAVNTEGVYSEPRPIGTRYLTRNL

SEQ ID NO: 133 - protein, 737 aa, Adeno-Associated Virus
  source 1..737: note = BMN_0213
MAADGYLPDWLEDNLSEGIREWWALKPGAPKPKANQQKQDDGRGLVLPGYKYLGPFNGLDKGEPVNAADAAALEHDKAYDQQLQAGDNPYLRYNHADAEFQERLQEDTSFGGNLGRAVFQAKKRVLEPLGLVEEGAKTAPGKKRPVEQSPQEPDSSSGIGKKGQQPAKKRLNFGQTGDSESVPDPQPLGEPPAAPSSLGLNTMAAGGGAPMADNNEGADGVGSSSGNWHCDSTWLGDRVITTSTRTWALPTYNNHLYKQISNGTSGGSTNDNTYFGYSTPWGYFDFNRFHCHFSPRDWQRLINNNWGFRPKKLSFKLFNIQVKEVTQNEGTKTIANNLTSTIQVFTDSEYQLPYVLGSAHQGCLPPFPADVFMIPQYGYLTLNNGSQAVGRSSFYCLEYFPSQMLRTGNNFSFSYTFEDVPFHSSYAHSQSLDRLMNPLIDQYLYYLSRTQSTGGTAGTQQLLFSQAGPNNMSAQAKNWLPGPMYRQQRVSTTLSQNNNSNFAWTGGTKYHLNGRDSLVNPGVAMATNKDDEDRLFPSSGVLMFGKQGAGKDNVDYSSVMLTSEEEVKTTNPVATEQYGVVADNLQQQNTAPIVGAVNSQGALPGMVWQNRDVYLQGPIWAKIPHTDGNFHPSPLMGGFGLKHPPPQILIKNTPVPADPPTAFNQAKLNSFITQYSTGQVSVEIEWELQKENSKRWNPEIQYTSNYYKSTNVDFAVNTEGVYSEPRPIGTRYLTRNL

SEQ ID NO: 134 - protein, 737 aa, Adeno-Associated Virus
  source 1..737: note = BMN_0214
MAADGYLPDWLEDNLSEGIREWWALKPGAPKPKANQQKQDDGRGLVLPGYKYLGPFNGLDKGEPVNAADAAALEHDKAYDQQLQAGDNPYLRYNHADAEFQERLQEDTSFGGNLGRAVFQAKRRVLEPLGLVEEGAKTAPGKKRPVEQSPQEPDSSSGIGKKGQQPAKKRLNFGQTGDSESVPDPQPLGEPPAAPSSLGLNTMAAGGGAPMADNNEGADGVGSSSGNWHCDSTWLGDRVITTSTRTWALPTYNNHLYKQISNGTSGGSTNDNTYFGYSTPWGYFDFNRFHCHFSPRDWQRLINNNWGFRPKKLSFKLFNIQVKEVTQNEGTKTIANNLTSTIQVFTDSEYQLPYVLGSARQGCLPPFPADVFMIPQYGYLTLNNGSQAVGRSSFYCLEYFPSQMLRTGNNFSFSYTFEDVPFHSSYAHSQSLDRLMNPLIDQYLYYLSRTQSTGGTAGTQQLLFSQAGPNNMSAQAKNWLPGPMYRQQRVSTTLSQNNNSNFAWTGGTKYHLNGRDSLVNPGVAMATNKDDEDRFFPSSGVLMFGKQGAGKDNVDYSSVMLTSEEEIKTTNPVATEQYGVVADNLQQQNTAPIVGAVNSQGALPGMVWQNRDVYLQGPIWAKIPHTDGNFHPSPLMGGFGLKHPPPQILIKNTPVPADPPTAFNQAKLNSFITQYSTGQVSVEIEWELQKENSKRWNPEIQYTSNYYKSTNVDFAVDTEGVYSEPRPIGTRYLTRNL

SEQ ID NO: 135 - protein, 737 aa, Adeno-Associated Virus
  source 1..737: note = BMN_0215
MAADGYLPDWLEDNLSEGIREWWALKPGAPKPKANQQKQDDGRGLVLPGYKYLGPFNGLDKGEPVNAADAAALEHDKAYDQQLQAGDNPYLRYNHADAEFQERLQEDTSFGGNLGRAVFQAKKRVLEPLGLVEEGAKTAPGKKRPVEQSPQEPDSSSGIGKKGQQPAKKRLNFGQTGDSESVPDPQPLGEPPAAPSSLGLNTMAAGGGAPMADNNEGADGVGSSSGNWHCDSTWLGDRVITTSTRTWALPTYNNHLYKQISNGTSGGSTNDNTYFGYSTPWGYFDFNRFHCHFSPRDWQRLINNNWGFRPKKLSFKLFDIQVKEVTQNEGTKTIANNLTSTIQVFTDSEYQLPYVLGSAHQGCLPPFPADVFMIPQYGYLTLNNGSQAVGRSSFYCLEYFPSQMLRTGNNFSFSYTFEDVPFHSSYAHSQSLDRLMNPLIDQYLYYLSRTQSTGGTAGTQQLLFSQAGPNNMSAQAKNWLPGPMYRQQRVSTTLSQNNNSNFAWTGGTKYHLNGRDSLVNPGVAMATNKDDEDRFFPSSGVLMFGKQGAGKDNVDYSSVMLTSEEEIKTTNPVATEQYGVVADNLQQQNTAPIVGAVNSQGALPGMVWQNRDVYLQGPIWAKIPHTDGNFHPSPLMGGFGLKHPPPQILIKNTPVPADPPTAFNQAKLNSFITQYSTGQVSVEIEWELQKENSKRWNPEIQYTSNYYKSTNVDFAVNTEGVYSEPRPIGTRYLTRNL

SEQ ID NO: 136 - protein, 737 aa, Adeno-Associated Virus
  source 1..737: note = BMN_0216
MAADGYLPDWLEDNLSEGIREWWALKPGAPKPKANQQKQDDGRGLVLPGYKYLGPFNGLDKGEPVNAADAAALEHDKAYDQQLQAGDNPYLRYNHADAEFQERLQEDTSFGGNLGRAVFQAKKRVLEPLGLVEEGAKTAPGKKRPVEQSPQEPDSSSGIGKKGQQPAKKRLNFGQTGDSESVPDPQPLGEPPAAPSSLGLNTMAAGGGAPMADNNEGADGVGSSSGNWHCDSTWLGDRVITTSTRTWALPTYNNHLYKQISNGTSGGSTNDNTYFGYSTPWGYFDFNRFHCHFSPRDWQRLINNNWGFRPKKLSFKLFNIQVKEVTQNEGTKTIANNLTSTIQVFTDSEYQLPYVLGSAHQGCLPPFPADVFMIPQYGYLTLNNGSQAVGRSSFYCLEYFPSQMLRTGNNFSFSYTFEDVPFHSSYAHSQSLDRLMNPLIDQYLYYLSRTQSTGGTAGTQQLLFSQAGPNNMSAQAKNWLPGPMYRQQRVSTTLSQNNNSNFAWTGGTKYHLNGRDSLVNPGVAMATNKDDEDRFFPSSAVLMFGKQGAGKDNVDYSSVMLTSEEEIKTTNPVATEQYGVVADNLQQQNTAPIVGAVNSQGALPGMVWQNRDVYLQGPIWAKIPHTDGNFHPSPLMGGFGLKHPPPQILIKNTPVPADPPTAFNQAKLNSFITQYSTGQVSVEIEWELQKENSKRWNPEIQYTSNYYKSTNVDFAVNTESVYSEPRPIGTRYLTRNL

SEQ ID NO: 137 - protein, 737 aa, Adeno-Associated Virus
  source 1..737: note = BMN_0217
MAADGYLPDWLEDNLSEGIREWWALKPGAPKPKANQQKQDDGRGLVLPGYKYLGPFNGLDKGEPVNAADAAALEHDKAYDQQLQAGDNPYLRYNHADAEFQERLQEDTSFGGNLGRAVFQAKKRVLEPLGLVEEGAKTAPGKKRPVEQSPQEPDSSSGIGKKGQQPAKKRLNFGQTGDSESVPDPQPLGEPPAAPSSLGLNTMAAGGGAPMADNNEGADGVGSSSGNWHCDSTWLGDRVITTSTRTWALPTYNNHLYKQISNGTSGGSTNDNTYFGYSTPWGYFDFNRFHCHFSPRDWQRLINNNWGFRPKKLSFKLFNIQVKEVTQNEGTKTIANNLTSTIQVFTDSEYQLPYVLGSAHQGCLPPFPADVFMIPQYGYLTLNNGSQAVGRSSFYCLEYFPSQMLRTGNNFSFSYTFEDVPFHSSYAHSQSLDRLMNPLIDQYLYYLSRTQSTGGTAGTQQLLFSQAGPNNMSAQAKNWLPGPMYRQQRVSTTLSQNNNSNFAWTGGTKYHLNGRDSLVYPGVAMATNKDDEDRFFPSSGVLMFGKQGAGKDNVDYSSVMLTSEEEIKTTNPVATEQYGVVADNLQQQNTAPIVGAVNSQGALPGMVWQNRDVYLQGPIWAKIPHTDGNFHPSPLMGGFGLKHPPPQILIKNTPVPADPPTAFNQAKLNSFITQYSTGQVSVEIEWELQKENSKRWNPEIQYTSNYYKSTNVDFAVNTEGVYSEPRPIGTRYLTRNL

SEQ ID NO: 138 - protein, 737 aa, Adeno-Associated Virus
  source 1..737: note = BMN_0218
MAADGYLPDWLEDNLSEGIREWWALKPGAPKPKANQQKQDDGRGLVLPGYKYLGPFNGLDKGGPVNAADAAALEHDKAYDQQLQAGDNPYLRYNHADAEFRERLQEDTSFGGNLGRAVFQAKKRVLEPLGLVEEGAKTAPGKKRPVEQSPQEPDSSSGIGKKGQQPAKKRLNFGQTGDSESVPDPQPLGEPPAAPSSLGLNTMAAGGGAPMADNNEGADGVGSSSGNWHCDSTWLGDRVITTSTRTWALPTYNNHLYKQISNGTSGGSTNDSTYFGYSTPWGYFDFNRSHCHFSPRDWQRLINNNWGFRPKKLSFKLFNIQVKEVTQNEGTKTIANNLTSTIQVFTDSEYQLPYVLGSAHQGCLPPFPADVFMIPQYGYLTLNNGGQAVGRSSFYCLEYFPSQMLRTGNNFSFSYIFEDVPFHSSYAHSQSLDRLMNPLIDQYLYYLSRTQSTGGTAGTQQLLFSQAGPNNMSAQAKNWLPGPMYRQQRVSTTLSQNNNSNFAWTGGTKYHLNGRDSLVNPGVAMATNKDDEDRFFPSSGVLMFGKQGAGKDNVDYSSVMLTSEEEIKTTNPVATEQYGVVADNLQQQNTAPIVGAVNSQGALPGMVWQNRDVYLQGPIWAKIPHTDGNFHPSPLMGGFGLKHPPPQILIKNTPVPADPPTAFNQAKLNSFITQYSTGQVSVEIEWELLKESSKRWNPEIQYTSNYYKSTNVDFAVNTEGVYSEPRPIGTRYLTRNL

SEQ ID NO: 139 - protein, 730 aa, Adeno-Associated Virus
  source 1..730: note = BMN_0250
MAADGYLPDWLEDNLSEGIREWWALKPGAPQPKANQQKQDDGRGLVLPGYKYLGPFNGLDKGEPVNEADAAALEHDKAYDQQLKAGDNPYLRYNHADAEFQERLQEDTSFGGNLGRAVLQAKKRVLEPLGLVEEAAKTAPGKKRPVDSPDSTSGIGKKGQQPARKRLNFGQTGDAESVPDPQPIGEPPAAPSGLGSGTMAAGGGAPMADNNEGADGVGNASGNWHCDSTWLGNRVITTSTRTWALPTYNNHLYKQISSSSSGATNDNHYFGYSTPWGYFDFNRFHCHFSPRDWQRLINNNWGFRPKRLRFKLFNIQVKEVTTNDGVTTIANNLTSTVQVFSDSEYQLPYVLGSAHQGCLPPFPADVFMIPQYGYLTLNNGSQSVGRSSFYCLEYFPSQMLRTGNNFEFSYEFEDVPFHSSYAHSQSLDRLMNPLIDQYLYYLARTQSSTGTSTRELQFHQAGPATMAEQSKNWLPGPCFRQQRISKTTDNNNNSNFAWTGATKYHLNGRSSLTNPGVPMATHKDDESVFFPINGVLVFGKTGASNKTTLENVLMTDEEEIKATNPVATEEYGVVSSNIQSQNSNPTTQTVNNQGALPGMVWQNRDVYLQGPIWAKIPHTDGNFHPSPLMGGFGLKHPPPQILIKNTPVPANPPETFTPAKFASFITQYSTGQVSVEIEWELQKENSKRWNPEIQYTSNYDKQTGVGFAVDTQGVYSEPRPIGTRYLTRNL

SEQ ID NO: 140 - protein, 730 aa, Adeno-Associated Virus; identical to SEQ ID NO: 54
  source 1..730: note = BMN_0251

SEQ ID NO: 141 - protein, 730 aa, Adeno-Associated Virus
  source 1..730: note = BMN_0253
MAADGYLPDWLEDNLSEGIREWWALKPGAPQPKANQQKQDDGRGLVLPGYKYLGPFNGLDKGEPVNEADAAALEHDKAYDQQLKAGDNPYLRYNHADAEFQERLQEDTSFGGNLGRAVFQAKKRVLEPLGLVEEAAKTAPGKKRPVDSPDSTSGIGKKGQQPARKRLNFGQTGDAESVPDPQPIGEPPAAPSGLGSGTMAAGGGAPMADNNEGADGVGNAPGNWHCDSTWLGNRVITTSTRTWALPTYNNHLYKQISSSSSGATNDNHYFGYSTPWGYFDFNRFHCHFSPRDWPRLINNNWGFRPKRLRFKLFNIQVKEVTTNDGVTTIANNLTSTVQVFSDSEYQLPYVLGSAHQGCLPPFPADVFMIPQYGYLTLNNGSQSVGRSSFYCLEYFPSQMLRTGNNFEFSYEFEDVPFHSSYAHSQSLDRLMNPLIDQYPYYLARTQSSTGTSTRELQFHQAGPATMAEQSKNWLPGPCFRQQRISKTTDNNNNSNFAWTGATKYHLNGRNSLTNPGVPMATHKDDESVFFPINGVLVFGKTGASNKTTLENVLMTDEEEIKATNPVATEEYGVVSSNIQSQNSNPATQTVNNQGALPGMVWQNRDVYLQGPIWAKIPHTDGNFHPSPLMGGFGLKHPPPQILIKNTPVPANPPETFTPAKFASFITQYSTGQVSVEIEWELQKENSKRWNPEIQYTSNYDKQTGVDFAVDTQGVYSEPRPIGTRYLTRNL

SEQ ID NO: 142 - protein, 730 aa, Adeno-Associated Virus
  source 1..730: note = BMN_0254
MAADGYLPDWLEDNLSEGIREWWALKPGAPQPKANQQKQDDGRGLMLPGYKYLGPFNGLDKGEPVNEADAAALEHDKAYDQQLKAGDNPYLRYNHADAEFQERLQEDTSFGGNLGRAVFQAKKRVLEPLGLVEEAAKTAPGKKRPVDSPDSTSGIGKKGQQPARKRLNFGQTGDAESVPDPQPIGEPPAAPSGLGSGTMAAGGGAPMADNNEGADGVGNASGSWHCDSTWLGNRVITTSTRTWALPTYNNHLYKQISSSSSGATNDNHYFGYSTPWGYFDFNRFHCHFSPRDWQRLINNNWGFRPKRLRFKLFNIQVKEVTTNDGVTTIANNLTSTVQVFSDSEYQLPYVLGSAHQGCLPPFPADVFMIPQYGYLTLNNGRQSVGRSSFYCLEYFPSQMLRTGNNFEFSYEFEDVPFHSSYAHSQSLDRLMNPLIDQYPYYLARTQSSTGTSTRELQFHQAGPATMAEQSKNWLPGPCFRQQRISKTTDNNNNSNFAWTGATKYHLNGRNSLTNPGVPMATHKDDESVFFPINGVLVFGKTGASNKTTLENVPMTDEEEIKATNPVATEEYGVVSSNIQSQNSNPTTQTVNNQGALPGMVWQNRDVYLQGPIWAKIPHTDGNFHPSPLMGGFGLKHPPPQILIKNTPVPANPPETFTPAKFASFITQYSTGQVSVEIEWELQKENNKRWNPEIQYTSNYDKQTGVDFAVDTQGVYSEPRPIGTRYLTRNL

SEQ ID NO: 143 - protein, 730 aa, Adeno-Associated Virus
  source 1..730: note = BMN_0255
MAADGYLPDWLEDNLSEGIREWWALKPGAPQPKANQQKQDDGRGLVLPGYKYLGPFSGLDKGEPVNEADAAALEHDKAYDQQLKAGDNPYLRYNHADAEFQERLQEDTSFGGNLGRAVFQAKKRVLEPLGLVEEAAKTAPGKKRPVDSPDSTSGIGKKGQQPARKRLNFGQTGDAESVPDPQPIGEPPAAPSGLGSGTMAAGGGAPMADNNEGADGVGNASGNWHCDSTWLGNRVITTSTRTWALPTYNDHLYKQISSSSSGATNDNHYFGYSTPWGYFDFNRFHCHFSPRDWQRLINNNWGFRPKRLRFKLFNIQVKEVTTNDGVTTIANNLTSTVQVFSDSEYQLPYVLGSAHQGCLPPFPADVFMIPQYGYLTLNNGSQSVGRSSFYCLEYFPSQMLRTGNNFEFSYEFEDVPFHSSYAHSQSLDRLMNPLIDQYLYYLARTQSSTGTSTRELQFHQAGPATMAEQSKNWLPGPCFRQQRISKTTDNNNNSNFAWTGATKYHLNGRNSLTNPGVPMATHKDDESVFFPINGVLVFGKTGASNKTTLENVLMTDEEEIKATNPVATEEYGVVSSNIQSQNSNPTTQTVNNQGALPGMVWRNRDVYLQGPIWAKIPHTDGNFHPSPLMGGFGLKHPPPQILIKNTPVPANPPETFTPAKFASFITQYSTGQVSVEIEWELQKENSKRWNPEIQYTSNYDKQTGVDFAVDTQGVYSEPRPIGTRYLTRNL

SEQ ID NO: 144 - protein, 730 aa, Adeno-Associated Virus
  source 1..730: note = BMN_0256
MAADGYLPDWLEDNLSEGIREWWALKPGAPQPKANQQKQDDGRGLVLPGYKYLGPFNGLDKGEPVNEADAAALEHDKAYDQQLKAGDNPYLRYNHADAEFQERLQEDTSFGGNLGRAVFQAKKRVLEPLGLVEEAAKTAPGKKRPVDSPDSTSGIGKKGQQPARKRLNFGQTGDAESVPDPQPIGEPPAAPSGLGSGTMAAGGGAPMADNNEGADGVGNASGNWHCDSTWLGNRVITTSTRTWALPTYNNHLYKQISSSSSGATNDNHYFGYSTPWGYFDFNRFHCHFSPRDWQRLINNNWGFRPKRLRFKLFNIQVKEVTTNDGVTTIANNLTSTVQVFSDSEYQLPYVLGSAHQGCLPPFPADVFMIPQYGYLTLNNGSQSVGRSSFYCLEYFPSQMLRTGNNFEFSYEFEDVPFHSSYAHSQSLDRLMNPLIDQYLYYMARTQSSTGTSTREPQFHQAGPATMAEQSKNWLPGPCFRQQRISKTTDNNNNSNFAWTGATKYHLNGRNSLTNPGVPMATHKDDESVFFPINGVLVFGKTGASNKTTLENVLMTDEEEIKATNPVATEEYGVVSSNIQSQNSNPTTQTVNNQGALPGMVWQNRDVYLQGPIWAKIPHTDGDFHPSPLMGGFGLKHPPPQILIKNTPVPANPPETFTPAKFASFITQYSTGQVSVEIEWELQKENSKRWNPEIQYTSNYDKQTGVDFAVDTQGVYSEPRPIGTRYLTRNL

SEQ ID NO: 145 - protein, 730 aa, Adeno-Associated Virus
  source 1..730: note = BMN_0257
MAADGYLPDWLEDNLSEGIREWWALKPGAPQPKANQQKQDDGRGLVLPGYKYLGPFNGLDKGEPVNEADAAALEHDKAYDQQLKAGDNPYLRYNHADAEFQERLQEDTSFGGNLGRAVFQAKKRVLEPLGLVEEAAKTAPGKKRPVDSPDSTSGIGKKGQQPARKRLNFGQTGDAESVPDPQPIGEPPAAPSGLGSGTMAAGGGAPMADNNEGADGVGNASGNWHCDSTWLGNRVITTSTRTWALPTYNNHLYKQISSGSSGATNDNHYFGYSTPWGYFDFNRFHCHFSPRDWQRLINNNWGFRPKRLRFKLFNIQVKEVTTNDGVTTIANNLTSTVQVFSDSEYQLPYVLGSAHQGCLPPFPADVFMIPQYGYLTLNNGSQSVGRSSFYCLEYFPSQVLRTGNNFEFSYEFEDVPFHSSYAHSQSLDRLMNPLIDQYLYYLARTQSSTGTSTRELQFHQAGPATMAEQSKNWLPGPCFRQQRISKTSDNNNNSNFAWTGATKYHLNGRNSLTNPGVPMATHKDDESVFFPINGVLVFGKTGASNKTTLENVLMTDEEEIKATNPVATEEYGVVSSNIQSQNSNPTTQTVNNQGALPGMVWQNRDVYLQGPIWAKIPHTDGNFHPSPLMGGFGLKHPPPQILIKNTPVPANPPETFTPAKFASFITQYSTGQVSVEIEWELQKENSKRWNPEIQYTSNYDKQTGVDFAVDTQGVYSEPRPIGTRYLTRNL

SEQ ID NO: 146 - protein, 730 aa, Adeno-Associated Virus
  source 1..730: note = BMN_0258
MAADGYLPDWLEDNLSEGIREWWALKPGAPQPKANQQKQDDGRGLVLPGYRYLGPFNGLDKGEPVNEADAAALEHDKAYDQQLKAGDNPYLRYNHADAEFQERLQEDTSFGGNLGRAVFQAKKRILEPLGLVEEAAKTAPGKERPVDSPDSTSGIGKKGQQPARKRLNFGQTGDAESVPDPQPIGEPPAAPSGLGSGTMAAGGGAPMADNNEGADGVGNASGNWHCDSTWLGNRVITTSTRTWALPTYDNHLYKQISSSSSGATNDNHYFGYSTPWGYFDFNRFHCHFSPRDWQRLINNNWGFRPKRLRFKLFNIQVKEVTTNDGVTTIANNLTSTVQVFSDSEYQLPYVLGSAHQGCLPPFPADVFMIPQYGYLTLNNGSQSVGRSSFYCLEYFPSQMLRTGNNFEFSYEFEDVPFHSSYAHSQSLDRLMNPLIDQYLYYLARTQSSTGTSTRELQFHQAGPATMAEQSKNWLPGPCFRQQRISKTTDNNNNSNFAWTGATKYHLNGRNSLTNPGVPMATHKDDESVFFPINGVLVLGKTGASNKTTLENVLMTDEEEIKATNPVATEEYGVVSSNIQSQNSNPTTQTVNNQGALPGMVWQNRDVYLQGPIWAKIPHTDGNFHPSPLMGGFGLKHPPPQILIKNTPVPANPPETFTPAKFASFITQYSTGQVSVEIEWELQKENSKRWNPEIQYTSNYDKQTGVDFAVDTQGVYSEPRPIGTRYLTRNL

SEQ ID NO: 147 - protein, 730 aa, Adeno-Associated Virus
  source 1..730: note = BMN_0260
MAADGYLPDWLEDNLSEGIREWWALKPGAPRPKANQQKQDDGRGLVLPGYKYLGPFNGLDKGEPVNEADAAALEHDKAYDQQLKAGDNPYLRYNHADAEFQERLQEDTSFGGNLGRAVFQAKKRVLEPLGLVEEAAKTAPGKKRPVDSPDSTSGIGKKGQQPARKRLNFGQTGDAESVPDPQPIGEPPAAPSGLGSGTMAAGGGAPMADNNEGADGVGNASGNWHCDSTWLGNRVITTSTRTWALPTYNNHLYKQISSSSSGATNDNHYFGYSTPWGYFDFNRFHCHFSPRDWQRLINNNWGFRPKRLRFKLFNIQVKEVTTNDGVTTIANNLTSTVQVFSDSEYQLPYVLGSAHQGCLPPFPADVFMIPQYGYLTLNNGSQSVGRSSFYRLEYFPSQMLRTGNNFEFSYEFEDVPFHSSYAHSQSLDRLMNPLIDQYLYYLARTQSSTGTSTRELQFHQAGPATMAEQSKNWLPGPCFRQQRISKTTDNNNNSNFAWTGATKYHLNGRNSLTNPGVPMATHRDDESVFFPINGVLVFGKTGASNKTTLENVLMTDEEEIKATNPVATEEYGVVSSNIQSQNSNPTTQTVNNQGALPGMVWQNRDVYLQGPIWAKIPHTDGNFHPSPLMGGFGLKHPPPQILIKNTPVPANPPETFTPAKFASFITQYSTGQVSVEIEWELQKENSKRWNPEIQYTSNYDKQTGVDFAVDTQGVYSEPRPIGTRYLTRNL

SEQ ID NO: 148 - protein, 739 aa, Adeno-Associated Virus
  source 1..739: note = BMN_0261
MAADGYLPDWLEDNLSEGIREWWALKPGAPQPKANQQHQGNSRGLVLPGYKYLGLFNGLDKGEPVNEADAAALEHDKAYDKQLEQGDDPYLKYNHADAEFQERLQEDTSFGGNLGRAVFQAKKRILEPLGLVEEAAKTAPGKKRPLEKTPNQPTDTQAAGQTPAKKRPQGEQSGDSARRQLDFGPQPAAPIGQPPAAPPPVGSNTMASGGGGPMADDNQGADGVGNASGNWHCDSTWLGDRVITTSTRTWVLPTYNNHIYKQISSESGATNDNHYFGYSTPWGYFDFNRFHCHFSPRDWQRLINNNWGFRPKRLNFKIFNVQVKEVTQIEGGSTIANNLTSTIQVFADSEYQLPYVLGSAHQGCLPPFPADVFMIPQYGYLTLNNGSQSVGRSSFYCLEYFPSQMLRTGNNFQFSYTFESVPFHSSYAHSQSLDRIMNPLVDQYLYYLARTQTGTGSTTSNTRQLQFYQAGPSNMADQSRNWLPGPMYRQQRVSKTLDQNSNTNFAWTAASKYNLNGRKSLANPGIAMATHKDDEERFFPQHGVLVFGQTNATNKTTLDNVLVTSEEEIKATNPVATEEYGTVSSNLQASNTNPTTETVNNQGILPGMVWQDRDVYLQGPIWAKIPHTDGHFHPSPLMGGFGLKHPPPQILIKNTPVPANPPETFTTSKFASYITQYSTGQVSVEIEWELQKENSKRWNPEIQYTSNYAKSNNVEFSVDAAGVYSEPRPIGTRYLTRNL

SEQ ID NO: 149 - protein, 739 aa, Adeno-Associated Virus
  source 1..739: note = BMN_0262
MAADGYLPDWLEDNLSEGIREWWALKPGAPQPKANQQHQDNSRGLVLPGYKYLGPFNGLDKGEPVNEADAAALEHDKAYDKQLEQGDNPYLKYNHADAELQERLQEDTSFGGNLGRAVFQAKKRILEPLGLVEEAAKTAPGKKRPLEKTPNQPTDTQAAGQTPAKKRPQGEQSGDSARRQLDFDPQPAAPIGQPPAAPPPVGSNTMASGGGGPMADDNQGADGVGNASGNWHRDSTWLGDRVITTSTRTWVLPTYNNHIYKQISSESGATNDNHYFGYSTPWGYFDFNRFHCHFSPRDWQRLINNNWGFRPKRLNFKIFNIQVKEVTQIEGGSTIANNLTSTIQVFADSEYQLPYVLGSAHQGCLPPFPADVFMIPQYGYLTLNNGSQSVGRSSFYCLEYFPSQMLRTGNNFQFSYTFESVPFHSSYAHSQSLDRIMNPLVDQYLYYLARTQTGTGSTTSNTRQLQFYQAGPSNMADQSRNWLPGPMYRQQRVSKTLDQNSNTNFAWTAASKYNLNGRKSLANPGIAMATHKDDEERFFPQHGVLVFGQTNATNKTTLDNVLITSEEEIKATNPVATEEYGTVSSNLQASNTNPTTETVNSQGILPGMVWQDRDVYLQGPIWAKIPHTDGHFHPSPLMGGFGLKHPPPQILIKNTPVPANPPETFTTSKFASYITQYSTGQVSVEIEWELQKENGKRWNPEIQYTSNYAKSNNVEFSVDAAGVYSEPRPIGTRYLTRNL

SEQ ID NO: 150 - protein, 739 aa, Adeno-Associated Virus
  source 1..739: note = BMN_0263
MAADGYLPDWLEDNLSEGIREWWALKPGAPQPKANQQHQDNSRGLVLPGYKYLGPFNGLDKGEPVNEADAAALEHDKAYDKQLEQGDNPYLKYNHADAEFQERLQEDTSFGGNLGRAVFQAKKRILEPLGLVEEAAKTAPGKRRPLEKTPNQPTDTQAAGQTPAKKRPQGEQSGDSARRQLDFDPQPAAPIGQPPAAPSPVGSNTMASGGGGPMADDNQGADGVGNASGNWHCDSTWLGDRVITTSTRTWVLPTYNNHIYKQISSESGATNDNHYFGYSTPWGYFDFNRFHCHFSPRDWQRLINNNWGFRPKRLNFKIFNIQVKEVTQIEGGSTIANNLTSTIQVFADSEYQLPYVLGSAHQGCLPPFPADVFMIPQYGYLTLNNGSQSVGRSSFYCLEYFPSQMLRTGNNFQFSYTFESVPFHSSYAHSQSLDRIMNPLVDQCLYYLARTQTGTGSTTSNTRQLQFYQAGPSNMADQSRNWLPGPMYRQQRVSKTLDQNSNTNFAWTAASKYNLNGRKSLANPGIAMATHKDDEERFFPQHGVLVFGQTNATNKTTLDNVLITSEEEIKATNPVATEEYGTVSSNLQASNTNPTTETVNNQGILPGMVWQDRDVYLQGPIWAKIPHTDGHFHPSPLMGGFGLKHPPPQILIKNTPVPANPPETFTTSKFASYITQYSTGQVSVEIEWELQKEDSKRWNPEIQYTSNYAKSNNVEFSVDAAGVYSEPRPIGTRYLTRNL

SEQ ID NO: 151 - protein, 739 aa, Adeno-Associated Virus
  source 1..739: note = BMN_0264
MAADGYLPDWLEDNLSEGIREWWALKPGAPQPKANQQHQDNSRGLVLPGYKYLGPFNGLDKGEPVNEADAAALEHDKAYDKQLEQGDNPYLKYNHADAEFQERLQEDTSFGGNLGRAVFQAKKRILEPLGLVEEAAKTAPGKKRPLEKTPNQPTDTQAAGQTPAKKRPQGGQSGDSARRQLDFDPQPAAPIGQPPAAPSPVGSNTMASGGGGPMADDNQGADGVGNASGNWHCDSTWLGDRVITTSTRTWVLPTYNNHIYKQISSESGATNDNHYFGYSTPWGYFDFNRFHCHFSPRDWQRLINNNWGFRPKRLNFKIFNIQVKEVTQIEGGSTIANNLTSTIQVFADSEYLLPYVLGSAHQGCLPPFPADVFMIPQYGYLTLNNGSQSVGRSSFYCLEYFPSQMLRTGNNFQFSYTFESVPFHSSYAHSQSLDRIMNPLVDQYLYYLARTQTGTGSTTSNTRQLQFYQAGPSNMADQSRNWLPGPMYRQQRVSKTLDQNSNTNFAWTAASKYNLNGRKSLANPGIAMATHKDDEERFFPQHGVLVFGQTNATNKTTLDNVLITSEEEIKATNPVATEEYGTVSSNLQASNTNPTTETVNNQGILPGMVWQDRDVYLQGPIWAKIPHTDGHFHPSPLMGGFGLKHPPPQILIKNTPVPANPPETFTTSKFASYITQYSTGQVSVEIEWELQKEDSKRWNPEIQYTSNYAKSNNVEFSVDAAGVYSEPRPIGTRYLTRNL

SEQ ID NO: 152 - protein, 739 aa, Adeno-Associated Virus
  source 1..739: note = BMN_0265
MAADGYLPDWLEDNLSEGIREWWALKPGAPQPKANQQHQDNSRGLVLPGYKYLGPFNGLDKGEPVNEADAAALEHDKAYDKQLEQGDNPYLKYNHADAEFQERLQEDTSFGGILGRAVFQAKKRILEPLGLVEEAAKTAPGKKRPLEKTPNQPTDTQAAGQTPAKKRPQGEQSGDSARRQLDFDPQPAAPIGQPPAAPSPVGSNTMASGGGGPMADDNQGADGVGNASGNWHCDSTWLGDRVITTSTRTWVLPTYNNHIYKQISSESGATNDNHYFGYSTPWGYFDFNRFHCHFSPRDWQRLINNNWGFRPKRLNFKIFNIQVKEVTQIEGGSTIANNLTSTIQVFADSEYQLPYVLGSAHQGCLPPFPADVFMIPQYGYLTLNNGSQSVGRSSFYCLEYFPSQMLRTGNNFQFSYTFESVPFHSSYAHSQSLDRIMNPLVDQYLYYLARTQTGTGSTTSNTRQLQFYQAGPSNMADQSRNWLPGPMYRQQRVSKTLDQNSNTNFAWTAASKYNLNGRKSLVNPGIAMATHKDDEERFFPQHGVLVFGKTNATNKTTLENVLVTDEEEVKATNPVATEEYGTVSSNLQSNTTNPTTETVNNQGILPGMVWQDRDVYLQGPIWAKIPHTDGHFHPSPLMGGFGLKHPPPQILIKNTPVPANPPETFTTSKFASYITQYSTGQVSVEIEWELQKENSKRWNPEIQYTSNYAKSNNVEFSADAAGVYSEPRPIGTRYLTRNL

SEQ ID NO: 153 - protein, 739 aa, Adeno-Associated Virus
  source 1..739: note = BMN_0266
MAADGYLPDWLEDNLSEGIREWWALKPGAPQPKANQQHQDNSRGLVLPGYKYLGPFNGLDKGEPVNEADAAALEHDKAYDKQLEQGDNPYLKYNHADAEFQERLQEDTSFGGNLGRAVFQAKKRILEPLGLVEEVAKTAPGKKRPLEKTPNQPTDTQAAGQTPAKKRPQGEQSGDSARRQLDFDPQPAAPIGQPPAAPSPVGSNTMASGGGGPMADDNQGADGVGNASGNWHCDSTWLGDRVITTSTRTWVLPTYNNHIYKQISSESGATNDNHYFGYSTPWGYFDFNRFHCHFSPRDWQRLINNNWGFRPKRLNFKIFNIQVKEVTQIEGGSTIANNLTSTIQVFADSEYQLPYVLGSAHQGCLPPFPADVFMIPQYGYLTLNNGSQSVGRSSFYCLEYFPSQMLRTGNNFQFSYTFESVPFHSSYAHSQSLDRIMNPLVDQYLYYLARTQTGTGSTTSNTRQLQFYQAGPSNMADQSRNWLPGPMYRQQRVSKTLDQNSNTNFAWTAASKYNLNGRKSLANPGIAMATHKDDEERFFPQHRVLVFGQTNATNKTTLDNVLITSEEEIKATNPVATEEYGTVSSNLQASNTDPTTETVNNQGILPGMVWQDRDVYLQGPIWVKIPHTDGHFHPSPLMGGFGLKHPPPQILIKNTPVPANPPETFTTSKFASYTTQYSTGQVSVEIEWGLQKENSKRWNPEIQYTSNYAKSNNVEFSVDAAGVYSEPRPIGTRYLTRNL

SEQ ID NO: 154 - protein, 739 aa, Adeno-Associated Virus
  source 1..739: note = BMN_0267
MAADGYLPDWLEDNLSEGIREWWALKPGAPQPKANQQHQDNSRGLVLPGYKYLGPFNGLDKGEPVNEAYAAALEHDKAYDKQLEQGDNPYLKYNHADAEFQERLQEDTSFGGNLGRAVFQAKKRIPEPLGLVEEAAKTAPGKKRPLEKTPNQPTDTQAAGQTPAKKRPQGEQSGDSARRQLDFDPQPAAPIGQPPAAPSPVGSNTMASGGGGPMADDNQGADGVGNASGNWHCDSTWLGDRVITTSTRTWVLPTYNNHIYKQISSESGATNDNHYFGYSTPWGYFDFNRFHCHFSPRDWQRLINNNWGFRPKRLNFKIFNIQVKEVTQIEGGSTIANNLTSTIQVFADSEYQLPYVLGSAHQGCLPPFPADVFMIPQYGYLTLNNGSQSVGRPSFYCLEYFPSQMLRTGNNFQFSYTFESVPFHSSYAHSQSLDRIMNPLVDQYLYYLARTQTGTGSTTSNTRQLQFYQAGPSNMADQSRNWLPGPMYRQQRVSKTLDQNSNTNFAWTAASKYNLNGRKSLANPGIAMATHKDDEERFFPQHGVLVFGQTNATNKTTLDNVLITSEEEIKATNPVATEEYGTVSSNLQASNTNPTTETVNNQGILPGMVWQDRDVYLQGPIWAKIPHTDGHFHPSPLMGGFGLKHPPPQILIKNTPVPANPPETFTTSKFASYITQYSTGQVSVEIEWELQKENSKRWNPEIQYTSNYAKSNNVEFSVDAAGVYSEPRPIGTRYLTRNL

SEQ ID NO: 155 - protein, 739 aa, Adeno-Associated Virus
  source 1..739: note = BMN_0268
MAADGYLPDWLEDNLSEGIREWWALKPGAPQPKANQQHQDNSRGLVLPGYKYLGPFNGLDKGEPVNEADAAALEHDKAYDKQLEQGDNPYLKYNHADAEFQERLQEDTSFGGNLGRAVFQAKKRILEPLGLVEEAAETAPGKKRPLEKTPNQPTDTQAAGQTPAKKRPQGEQSGDSARRQLDFDPQPAAPIGQPPAAPSPVGSNTMASGGGGPMADDNQGADGVGNASGNWHCDSTWLGDRVITTSTRTWVLPTYNNHIYKQISSESGATNDNHYFGYSTPWGYFDFNRFHCHFSPRDWQRLINNNWGFRPKRLNFKIFNIQVKEVTQTEGGSTIANNLTSTIQVFADSEYQLPYVLGSAHQGCLPPFPADVFMIPQYGYLTLNNGSQSVGRSSFYCLEYFPSQMLRTGNNFQFSYTFESVPFHSSYAHSQSLDRIINPLVDQYLYYLARTQTGTGSTTSNTRQLQFYQAGPSNMADQSRNWLPGPMYRQQRVSKTLDQNSNTNFAWTAASKYNLNGRKSLANPGIAMATHKDDEERFFPQHGVLVFGQTNATNKTTLDNVLITSEEEIKATNPVATEEYGTVSSNLQASNTNPTTETVNNQGILPGMVWQDRDVYLQGPIWAKIPHTDGHFHPSPLMGGFGLKHPPPQILIKNTPVPANPPETFTTSKFASYITQYSTGQVSVEIEWELQKENSKRWNPEIQYTSNYAKSNNVEFSVDAAGVYSEPRPIGTRYLTRNL

SEQ ID NO: 156 - protein, 739 aa, Adeno-Associated Virus
  source 1..739: note = BMN_0269
MAADGYLPDWLEDNLSEGIRGWWALKPGAPQPKANQQHQDNSRGLVLPGYKYLGPFNGLDKGEPVNEADAAALEHDKAYDKQLEQGDNPCLKYNHADAEFQERLQEDTSFGGNLGRAVFQAKKRILEPLGLVEEAAKTAPGKKRPLEKTPNQPTDTQAAGQTPAKKRPQGEQSGDSARRQLDFDPQPAAPIGQPPAAPSPVGSNTMASGGGGPMADDNQGADGVGNASGNWHCDSTWLGDRVITTSTRTWVLPTYNNHIYKQISSESGATNDNHYFGYSTPWGYFDFNRFHCHFSPRDWQRLINNNWGFRPKRLNFKIFNIQVKEVTQIEGGSTIANNLTSTIQVFADSEYQLPYVLGSAHQGCLPPFPADVFMIPQYGYLTLNNGSQSVGRSSFYCLEYFPSQMLRTGNNFQFSYTFESVPFHSSYAHSQSLDRIMNPLVDQYLYYLARTQTGTGSTTSNTRQLQFYQAGPSNMADQSRNWLPGPMYRQQRVSKTLDQNSNTNFAWTAASKYNLNGRKSLANPGIAMATHKDDEERFFPQHGVLVFGQTNATNKTTLDNVLITSEEEIKATNPVATEEYGTVSSNLQASNTNPTTETVNNQGILPGMVWQDRDVYLQGPTWAKIPHTDGHFHPSPLMGGFGLKHPPPQILIKNTPVPANPPETFTTSKFASYITQYSTGQVSVEIEWELQKENSKRWNPEIQYTSNYAKSNNVEFSVDAAGVYSEPRPIGTRYLTRNL

SEQ ID NO: 157 - protein, 739 aa, Adeno-Associated Virus
  source 1..739: note = BMN_0270
MAADGYLPDWLEDNLSEGIREWWALKPGAPQPKANQQHQDNSRGLVLPGYKYLGPFNGLDKGEPVNEADAAALEHDKAYDKQLEQGDNPYLKYNHADAEFQERLQEDTSFGGNLGRAVFQAKKRILEPLGLVEEAAKTAPGKKRPLEKTPNQPTDTQAAGQTPAKKRPQGEQSGDSARRQLDFDPQPAAPIGQPPAAPSPVGSNTMASGGGGPMADDNQGADGVGNASGNWHCDSTWLGDRVITTSTRTWVLPTYNNHIYKQISSESGATNDNHYFGYSTPWGYFDFNRFHCHFSPRDWQRLINNNWGFRPKRLNFKIFNIQVKEVTQIEGGSTIANNLTSTIQVFADSEYQLPYVLGSAHQGCLPPFPADVFMIPQYGYLTLNNGSQSVGRSSFYCLEYFPSQMLRTGNSFQFSYTFESVPFHSSYAHSQSLDRIMNPLVDQYLYYLARTQTGTGSTTSNTRQLQFYQAGPSNMADQSRNWLPGPMYRQQRVSKTLDQNSNTNFAWTAASKYNLNGRKSLANPGIAMATHKDDEERFFPQHGVLVFGQTNATNKTTLDNVLITSEEEIKATNPVATEEYGTVSSNLQASNTNPTTETVNNQGILPGMVWQDRDVYLQGPIWAKIPHTDGHFHPSPLMGGFGLKHPPPQILIKNTPVPANPPETFTTSKFASYITQYSTGQVSVEIEWELQKENSKRWNPEIQYTSNYAKSNNVEFSVDAAGVYSEPRPIGTRYLTRNL

SEQ ID NO: 158 - protein, 739 aa, Adeno-Associated Virus
  source 1..739: note = BMN_0271
MAADGYLPDWLEDNLSEGIREWWALKPGAPQPKANQQHQDNSRGLVLPGYKYLGPFNGLDKGEPVNGADAAALEHDKAYDKQLEQGDNPYLKYNHADAEFQERLQEDTSFGGNLGRAVFQAKKRILEPLGLVEEAAKTAPGKKRPLEKTPNQPTDTQAAGQTPAKKRPQGEQSGDSARRQLDFDPQPAAPIGQPPAAPSPVGSNTMASGGGGPMADDNQGADGVGNASGNWHCDSTWLGDRVITTSTRTWVLPTYNNHIYKQISSESGATNDNHYFGYSTPWGYFDFNRFHCHFSPRDWQRLINNNWGFRPKRLNFKIFNIQVKEVTQIEGGSTIANNLTSTIQVFADSEYQLPYVLGSAHQGCLPPFPADVFMIPQYGYLTLNNGSQSVGRSSFYCLEYFPSQMLRTGNNFQFSYTFESVPFHSSYAHSQSLDRIMNPLVDQYLYYLARTQTGTGSTTSNTRQLQFYQAGPSNMADQSRNWLPGPMYRQQRVSKTLDQNSNTNFAWTAASKYNLNGRKSLVNPGIAMATHKDDEERFFPQHGVLVFGKTNATNKTTLENVLVTDEEEVKATNPVATEEYGTVSSNLQSNTTNPTTETVNNQGILPGMVWQDRDVYLQGPIWAKIPHTDGHFHPSPLMGGFGLKHPPPQILIKNTPVPANPPETFTTSKFASYITQYSTGQVSVEIEWELQKENSKRWNPEIQYTSNYAKSNNVEFSVDAAGVYSEPRLIGTRYLTRNL

SEQ ID NO: 159 - protein, 739 aa, Adeno-Associated Virus
  source 1..739: note = BMN_0272
MAADGYLPDWLEDNLSEGIREWWALKPGAPQPKANQQHQDNSRGLVLPGYKYLGPFNGLDKGEPVNEADAAALEHDKAYDKQLEQGDNPYLKYNHADAEFQERLQEDTSFGGNLGRAVFQAKKRILEPLGLVEEAAKTAPGKKRPLEKTPNQPTDTQAAGQTPAKKRPQGEQSGDSARRQLDFDPQPAAPIGQPPAAPSPVGSNTMASGGGGPMADDNQGADGVGNASGNWHCDSTWLGDRVITTSTRTWVLPTYNNHIYKQISSESGATNDNHYFGYSTPWGYFDFNRFHCHFSPRDWQRLINNNWGFRPKRLNFKIFNIQVKEVTQIEGGSTIANNLTSTIQVFADSEYQLPYVLGSAHQGCLPPFPADVFMIPQYGYLTLNNGSQSVGRSSFYCLEYFPSQMLRTGNNFQFSYTFESVPFHSSYAHSQSLDRIMNPLVDQYLYYLARTQTGTGSTTSNTRQLQFYQAGPSNMADQSRNWLPGPMYRQQRVSKTLDQNSNTNFAWTAASKYNLNGRKSLVNPGIAMATHKDDEERFFPQHGVLVFGKTNATNKTTLENVLVTDEEEVKATNPVATEEYGTVSSNLQSNTTNPTTETVNNQGILPGMVWQDRDVYLQGPIWAKIPHTDGHFHPSPLMGGFGLKHPPPQILIKNTPVPANPPETFTTSKFASYITQYSTGQVSVEIEWELQKENSKRWNPEIQYTSNYAKSNNVEFSVDAAGVYSEPRPIGTRYLTRNL

SEQ ID NO: 160 - protein, 739 aa, Adeno-Associated Virus
  source 1..739: note = BMN_0273
MAADGYLPDWLEDNLSEGIREWWALKPGAPQPKANQQHQDNSRGLVLPGYKYLGPFNGLDKGEPVNEADAAALEHDKAYDKQLEQGDNPYLKYNHADAEFQERLQEDTSFGGNLGRAVFQAKKRILEPLGLVEEAAKTAPGKKRPLEKTPNQPTDTQAAGQTPAKKRPQGEQSGDSARRQLDFDPQPAAPIGQPPAAPSPVGSNTMASGGGGPMADDNQGADGVGNASGNWHCDSTWLGDRVITTSTRTWVLPTYNNHIYKQISSESGATNDNHYFGYSTPWGYFDFNRFHCHFSPRDWQRLINNNWGFRPKRLNFKIFNIQVKEVTQIEGGSTIANNLTSTIQVFADSEYQLPYVLGSAHQGCLPPFPADVFMIPQYGYLTLNNGSQSVGRSSFYCLEYFPSQMLRTGNNFQFSYTFESVPFHSSYAHSQSLDRIMNPLVDQYLYYLARTQTGTGSTTSNTRQLQFYQAGPSNMADQSRNWLPGPMYRQQRVSKTLDQDSNTNFAWTAASKYNLNGRKSLVNPGIAMATHKDDEERFFPQHGVLVFGKTNATNKTTLENVLVTDEEEVKATNPVATEEYGTVSSNLQSNTTNPTTETVNNQGILPGMAWQDRDVYLQGPIWAKIPHTDGHFHPSPLMGGFGLKHPPPQILIKNTPVPANPPETFTTSKFASYITQYSTGQVSVEIEWELQKENSKRWNPEIQYTSNYAKSNNVEFSVDAAGVYSEPRPIGTRYLTRNL

SEQ ID NO: 161 - protein, 736 aa, Adeno-Associated Virus
  source 1..736: note = BMN_0302
MAADGYLPDWLEDNLSEGIREWWDLKPGAPKPKANQQKQDDGRGLVLPGYKYPGPFNGLDKGEPVNAADAAALEHDKAYDQQLKAGDNPYLRYNHADAEFQERLQEDTSFGGNLGRAVFQAKKRVFEPLGLVEEGAKTAPGKKRPVEQSPQEPDSSSGIGKTGQQPAKKRLNFGQTGDSESVPDPQPLGEPPAAPSGLGPNTMASGGGAPMADNNEGADGVGNSSGNWHCDSTWLGDRVITTSTRTWALPTYNNHLYKQISNSTSGGSTNDNTYFGYSTPWGYFDFNRFHCHFSPRDWQRLINNNWGFRPKRLNFKLFNIQVKEVTTNEGTKTIANNLTSTVQVFTDSEYQLPYVLGSAHQGCLPPFPADVFMVPQYGYLTLNNGSQALGRSSFYCLEYFPSQMLRTGNNFQFSYTFEDVPFHSSYAHSQSLDRLMNPLIDQYLYYLVRTQTTGTGGTQTLAFSQAGPSSMANQARNWVPGPSYRQQRVSTTKNQNNNSNFAWTGAAKFKLNGRNSLMNPGVAMASHKDDEDRFFPSSGVLIFGKQGAGNDGVDYSQVLITDEEEIKATNPVATEEYGEVAINDQAANTQAQTGLVHNQGVIPGMVWQNRDVYLQGPIWAKIPHTDGNFHPSPLMGGFGLMHPPPQILIKNTPVPADPPLTFNQAKLNSFITQYSTGQVSVEIEWELQKENSKRWNPEIQYTSNYYKSTNVDFAVNSDGVYSEPRPIGTRYLTRNL

SEQ ID NO: 162 - protein, 736 aa, Adeno-Associated Virus
  source 1..736: note = BMN_0303
MAADGYLPDWLEDNLSEGIREWWDLKPGAPKPKANQQKQDDGRGLVLPGYKYLGPFNGLDKGEPVNAADAAALEHDKAYDQQLKAGDNPYLRYNHADAEFQGRLQEDTSFGGNLGRAVFQAKKRVLEPLGLVEEGAKTAPGKKRPVEQSPQEPDSSSGIGKTGQQPAKKRLNFGQTGDSESVPDPQPLGEPPAAPSGLGPNTMASGGGAPMADNNEGADGVGNSSGNWHCDSTWLGDRVITTSTRTWALPTYNNHLYKQISNSTSGGSTNDNTYFGYSTPWGYFDFNRFHCHFSPRDWQRLINNNWGFRPKRPNFKLFNIQVKEVTTNEGTKTIANNLTSTVQAFTDSEYQLPYVLGSAHQGCLPPFPADVFMVPQYGYLTLNNGSQALGRSSFYCLEYFPSQMLRTGNNFQFSYTFEDVPFHSSYAHSQSLDRLMNPLIDQYLYYLVRTQTTGTGGTQTLAFSQAGPSSMANQARNWVPGPSYRQQRVSTTKNQNNNSNFAWTGAAKFKLNGRNSLMNPGVAMASHKDDEDRFSPSSGVLIFGKQGAGNDGVDYSQVLITDEEEIKATNPVATEEYGEVAINDQAANTQAQTGLVHNQGVIPGMVWQNRDVYLQGPIWAKIPHTDGNFHPSPLMGGFGLKHPPPQILIKNTPVPADPPLTFNQAKLNSFITQYSTGQVSVEIEWELQKENSKRWNPEIQYTSNYYKSTNVDFAVNSDGVYSEPRPIGTRYLTRNL

SEQ ID NO: 163 - protein, 736 aa, Adeno-Associated Virus
  source 1..736: note = BMN_0304
MAADGYLPDWLEDNLSEGIREWWDLKPGAPKPKANQQKQDDGRGLVLPGYKYLGPFNGLDKGEPVNAADAAALEHDKAYDQQLKAGDNPYLRYNHADAEFQGRLQEDTSFGGNLGRAVFQAKKRVLEPLGLVEEGAKTAPGKKRPVEQSPQEPDSSSGIGKTGQQPAKKRLNFGQTGDSESVPDPQPLGEPPAAPSGLGPNTMASGGGAPMADNNEGADGVGNSSGNWHCDSTWLGDRVITTSTRTWALPTYNNHLYKQISNSTSGGSTNDNTYFGYSTPWGYFDFNRFHCHFSPRDWQRLINNNWGFRPKRLNFKLFNIQVKEVTTNEGTKTIANNLTSTVQVFTDSEYQLPYVLGSAHQGCLPPFPADVFMVPQYGYLTLNNGSQALGRSSFYCLEYFPSQMLRTGNNFQFSYTFEDVPFHSSYAHSQSLDRLMNPLIDQYLYYLVRTQTTGTGGTQILAFSQAGPSSMANQARNWVPGPSYRQQRVSTTKNQNNNSNFAWTGAAKFKLNGRNSLMNPGVAMASHKDDEDRFFPSSGVLIFGKQGAGNDGMDYSQVLITDEEEIKATNPVATEEYGEVAINDQAANTQAQTGLVHNQGVIPGMVWQNRDVYLQGPIWAKIPHTDGNFHPSPLMGGFGLKHPPPQILIKNTPVPADPPLTFNQAKLNSFITQYSTGQVSVEIEWELQKENSKRWNPEIQYTSNYYKSTNVDFAVNSDGVYSEPRPIGTRYLTRNL

SEQ ID NO: 164 - protein, 736 aa, Adeno-Associated Virus
  source 1..736: note = BMN_0305
MAADGYLPDWLEDNLSEGIREWWDLKPGAPKPKANQQKQDDGRGLVLPGYKYLGPFNGLDKGEPVNAADAAALEHDKAYDQQLKAGDNPYLRYNHADAEFQERLQEDTSFGGNLGRAVFQAKKRVLEPLGLVEEGAKTAPGKKRPVEQSPQEPDSSSGIGKTGQQPAKKRLNFGQTGDSESVPDPQPLGEPPAAPSGLGPNTMASGGGAPMADNNEGADGVGNSSGNWHCDSTWLGDRVITTSTRTWALPTYNNHLYKQISNSTSGGGTNDNTYFGYSTPWGYFDFNRFHCHFSPRDWQRLINNNWGFRPKRLNFKLFNIQVKEVTTNEGTKTIANNLTSTVQVFTDSEYQLPYVLGSAHQGCLPPFPADVFMVPQYGHLTLNNGSQALGRSSFYCLEYFPSQMLRTGNNFQFSYTFEDVPFHSSYAHSQSLDRLMNPLIDQYLYYLVRTQTTGTGGTQTLAFSQAGPSSMANQARNWVPGPSYRQQRVSTTKDQNNNSNFAWTGAAKFKLNGRNSLMNPGVAMASHKDDEDRFFPSSGVLIFGKQGAGNDGVDYSQVLITDEEEIKATNPVATEEYGEVAVNDQAANTQAQTGLVHNQGVIPGMVWQNRDVYLQGPIWAKIPHTDGNFHPSPLMGGFGLKHPPPQILIKNTPVPADPPLTLNQAKLNSFITQYSTGQVSVEIEWELQKENSKRWNPEIQYTSNYYKSTNVDFAVNSDGVYSEPRPIGTRYLTRNL

SEQ ID NO: 165 - protein, 736 aa, Adeno-Associated Virus
  source 1..736: note = BMN_0306
MAADGYLPDWLEDNLSEGIREWWDLKPGAPKPKANQQKQDDGRGLVLPGYKYLGPFNGLDKGEPANAADAAALEHDKAYDQQLKAGDNPYLRYNHADAEFQERLQEDTSFGGNLGRAIFQAKKRVLEPLGLVEEGAKTAPGKKGPVEQSPQEPDSSSGIGKTGQQPAKKRLNFGQTGDSESVPDPQPLGEPPAAPSGLGPNTMASGGGAPMADNNEGADGVGNSSGNWHCDSTWLGDRVITTSTRTWALPTYNNHLYKQISNGTSGGSTNDNTYFGYSTPWGYFDFNRFHCHFSPRDWQRLINNNWGFRPKRLNFKLFNIQVKEVTTNEGTKTIANNLTSTVQVFTDSEYQLPYVLGSAHQGCLPPFPADVFMVPQYGYLTLNNGSQALGRSSFYCLEYFPSQMLRTGNNFQFSYTFEDVPFHSSYAHSQSLDRLMNPLIDQYLYYLVRTQTTGTGGTQTLAFSQAGPSSMANQARNWVPGPCYRQQRVSTTTNQNNNSNFAWTGAAKFKLNGRDSLMNPGVAMASHKDDDDRFFPSSGVLIFGKQGTGNDGVDYSQVLITDEEEIKATNPVATEEYGAVAINNQAANTQAQTGLVHNQGVIPGMVWQNRDVYLQGPIWAKIPHTDGNFHPSPLMGGFGLKHPPPQILIKNTPVPADPPLTFNQAKLNSFITQYSTGQVSVEIEWELQKENSKRWNPEIQYTSNYYKSTNVDFAVNTEGVYSEPRPIGTRYLTRNL

SEQ ID NO: 166 - protein, 736 aa, Adeno-Associated Virus
  source 1..736: note = BMN_0307
MAADGYLPDWLEDNLSEGIREWWDLKPGAPKPKANQQKQDDGRGLVLPGYKYLGPFNGLDKGEPVNAADAAALEHDKAYDQQLKAGDNPYLRYNHADAEFQERLQEDTSFGGNLGRAIFQAKKRVLEPLGLVEEGAKTAPGKKRPVEQSPQEPDSSSGIGKTGQQPAKKRLNFGQTGDSESVPDPQPLGEPPAAPSGLGPNTMASGGGAPMADNNEGADGVGNPSGNWHCDSTRLGDRVITTSTRTWALPTYNNHLYKQISNGTSGGSTNDNTYFGYSTPWGYFDFNRFHCHFSPRDWQRLINNNWGFRPKRLNFKLFNIQVKEVTTNEGTKTIANNLTSTVQVFTDSEYQLPYVLGSAHQGCLPPFPADVFMVPQYGYLTLNNGSQALGRSSFYCLEYFPSQMLRTSNNFQFSYTFEDVPFHSSYAHSQSLDRLMNPLIDQYLYYLVRTQTTGTGGTQTLAFSQAGPSSMANQARNWVPGPCYRQQRVSTTTNQNNNSNFAWTGAAKFKLNGRDSLMNPGVAMASHKDDDDRFFPSSGVLIFGKQGTGNDGVDYSQVLITDEEEIKATNPVATEEYGAVAINNQAANTQAQTGLVHNQGVIPGMVWQNRDVYLQGPIWAKIPHTDGNFHPSPLMGGFGLKLPPPQILIKNTPVPADPPLTFNQAKLNSFITQYSTGQVSVEIEWELQKENSKRWNPEIQYTSNYYKSTNVDFAVNTEGVYSEPRPIGTRYLTRNL

SEQ ID NO: 167 - protein, 736 aa, Adeno-Associated Virus
  source 1..736: note = BMN_0308
MAADGYLPDWLEDNLSEGIREWWDLKPGAPKPKANQQKQDDGRGLVLPGYKYLGPFNGLDKGEPVNAADAAALEHDKAYDQQLKAGDNPYLRYNHADAEFQERLQEDTSFGGNLGRAIFQAKKRVLEPLGLVEEGAKTAPGKKRPVEQSPQEPDSPSGIGKTGQQPAKKRLNFGQTGDSESVPDPQPLGEPPAAPSGLGPNTMASGGGAPMADNNEGADGVGNSSGNWHCDSTWLGDRVITTSTRTWALPTYNNHLYKQISNGTSGGSTNDNTYFGYSTPWGYFDFNRFHCHFSPRDWQRLINNNWGFRPKRLNFKLFNIQVKEVTTNEGTKTIANNLTSTVQVFTDSEYQLPYVLGSAHQGCLPPFPADVFMVPQYGYLTLNNGSQALGRSSFYCLEYFPSQMLRTGNNFQFSYTFEDVPFHSSYAHSQSLDRLMNPLIDQYLYYLVRTQTTGTGGTQTLAFSQAGPSSMANQARNWVPGPCYRQQRVSTTTNQNNNSNFAWTGAAKFKLNGRDSLMNPGVAMASHKDDDDRFFPSSGVLIFGKQGTGNDGVDYSQVLITDEEEIKATNPVATEEYGAVAINNQAANTQAQTGLVHNQGVIPGMVWQNRDVYLQGPIWAKIPHTDGNFHPSPLMGGFGLKHPPPQILIKNTPVPADPPLTFNQAKLNSFITQYSTGQVSVEIEWELQKENSKRWNPEIQYTSNYYKSTNVDFAVNTEGVYSEPRPIGTRYLTRNL

SEQ ID NO: 168 - protein, 736 aa, Adeno-Associated Virus
  source 1..736: note = BMN_0309
MAADGYLPDWLEDNLSEGIREWWDLKPGAPKPKANQQKQDDGRGLVLPGYKYLGPFNGLDKGEPVNAADAAALEHDKAYDQQLKAGDNPYLRYNHADAEFQERLQEDTSFGGNLGRAIFQAKRRVLEPLGLVEEGAKTAPGKKRPVEQSPQEPDSSSGIGKTGQQPAKKRLNFGQTGDSESVPDPQPLGEPPAAPSGLGPNTMASGGGAPMADNNEGADGVGNSSGNWHCDSTWLGDRVITTSTRTWALPTYNNHLYKQISNGTSGGSTNDNTYFGYSTPWGYFDFNRFHCHFSPRDWQRLINNNWGFRPKRLNFKLFNIQVKEVTTNEGTKTIANNLTSTVQVFTDSEYQLPYVLGSAHQGCLPPFPADVFMVPQYGYLTLNNGSQALGRSSFYCLEYFPSQMLRTSNNFQFSYTFEDVPFHSSCAHSQSLDRLMNPLIDQYLYYLVRTQTTGTGGTQTLAFSQAGPGSMANQARNWVPGPCYRQQRVSTTTNQNNNSNFAWTGAAKFKLNGRDSLMNPGVAMASHKDDDDRFFPSSGVLIFGKQGTGNDGVDYSQVLITDEEEIKATNPVATEEYGAVAINNQAANTQAQTGLVHNQGVIPGMVWQNRDVYLQGPIWAKIPHTDGNFHPPPLMGGFGLKHPPPQILIKNTPVPADPPLTFNQAKLNSFITQYSTGQVSVEIEWELQKENSKRWNPEIQYTSNYYKSTNVDFAVNTEGVYSEPRPIGTRYLTRNL

SEQ ID NO: 169 - protein, 736 aa, Adeno-Associated Virus
  source 1..736: note = BMN_0310
MAADGYLPDWLEDNLSEGIREWWDLKPGAPKPKANQQKQDDGRGLVFPGYKYLGPFNGLDKGEPVNAADAAALEHDKAYDQQLKAGDNPYLRYNHADAEFQERLQEDTSFGGNLGRAIFQAKKRVLEPLGLVEEGAKTAPGKKRPVEQSPQEPDSSSGIGKTGRQPAKKRLNFGQTGDSESVPDPQPLGEPPAAPSGLGPNTMASGGGAPMADNNEGADGVGNSSGNWHCDSTWLGDRVITTSTRTWALPTYNNHLYKQISNGTPGGSTNDNTYFGYSAPWGYFDFNRFHCHFSPRDWQRLINNNWGFRPKRLNFKLFNIQVKEVTTNEGTKTIANNLTSTVQVFTDSEYQLPYVLGSAHQGCLPPFPADVFMVPQYGYLTLNNGSQALGRSSFYCLEYFPSQMLRTGNNFQFSYTFEDVPFHSSYAHSQSLDRLMNPLIDQYLYYLVRTQTTGTGGTQTLAFSQAGPSSMANQARNWVPGPCYRQQRVSTTTNQNNNSNFAWTGAAKFKLNGRDSLMNPGVAMASHKDDDDRFFPSSGVLIFGKQGTGNDGVDYSQVLITDEEEIKATNPVATEEYGAVAINNQAANTQAQTGLVHNQGVIPGMVWQNRDVYQQGPIWAKIPHTDGNFHPSPLMGGFGLKHPPPQILIKNTPVPADPPLTFNQAKLNSFITQYSTGQVSVEIEWELQKENSKRWNPEIQYTSNYYKSTNVDFAVNTEGVYSEPRPIGTRYLTRNL

SEQ ID NO: 170 - protein, 736 aa, Adeno-Associated Virus
  source 1..736: note = BMN_0311
MAADGYLPDWLEDNLSEGIREWWDLKPGAPKPKANQQKQDDGRGLVLPGYKYLGPFNGLDKGEPVNAADAAALEHDKAYDQQLKAGDNPYLRYNHADAEFQERLQEDTSFGGNLGRAIFQAKKRVLEPLGLVEEGAKTAPGKKRPVEQSPQEPDSSSGIGKTGQQPAKKRLNSGQTGDSESVPDPQPLGEPPAAPSGLGPNTMASGGGAPMADNNEGADGVGNSSGNWHCDSTWLGDRVITTSTRTWALPTYNNHLYKQISNGTSGGSTNDNTYFGYSTPWGYFDFNRFHCHFSPRDWQRLINNNWGFRPKRLNFKLFNIQVKEVTTNEGTKTIANNLTSTVQVFTDSEYQLPYVLGSAYQGCLPPFPADVFMVPQYGYLTLNNGSQALGRSSFYCLEYFPSQMLRTGNNFQSSYTFEDVPFHSSYAHSQSLDRLMNPLIDQYLYYLVRTQTTGTGGTQTLAFSQAGPSSMANQARNWVPGPCYRQQRVSTTTNQNNNSNFAWTGAAKFKLNGRDSLMNPGVAMASHKDDDDRFFPSSGVLIFGKQGTGNDGVDYSQVLITDEEEIKATNPVATEEYGAVAINNQAANTQAQTGLVHNQGVIPGMVWQNRDVYLQGPIWAKIPHTDGNFHPSPLMGGFGLKHPPPQILIKNTPVPADPPLTFNQAKLNSFITQYSTGQVSVEIEWELQKENSKRWNPEIQYTSNYYKSTNVDFAVNTEGVYSEPRPIGTRYLTRNL

SEQ ID NO: 171 - protein, 736 aa, Adeno-Associated Virus
  source 1..736: note = BMN_0312
MAADGYLPDWLEDNLSEGIREWWDLKPGASKPKANQQKQDDGRGLVLPGYKYLGPFNGLDKGEPVNAADAAALEHDKAYDQQLKAGDNPYLRYNHADAEFQERLQEDTSFGGNLGRAVFQAKKRVLEPLGLVEEGAKTVPGKKRPVEQSPQEPDSSSGIGKTGQQPAKKRLNFGQTGDSESVPDPQPLGEPPAAPSGLGPNTMASGGGAPMADNNEGADGVGNSSGNWHCDSTWLGDRVITTSTRTWALPTYNNHLYKQISNGTSGGSTNDNTYFGYSTPWGYFDFNRFHCHFSPRDWQRLINNNWGFRPKRLNFKLFNIQVKEVTTNEGTKTIANNLTSTVQVFTDSEYQLPYVLGSAYQGCLPPFPADVFMVPQYGYLTLNNGSQALGRSSFYCLEYFPSQMLRTGNNFQFSYTFEDVPFHSSYAHSQSLDRLMNPLIDQYLYYLVRTQTTGTGGTQTLAFSQAGPSSMANQARNWVPGPCYRQQRVSTTTNQNNNSNFAWTGAAKFKLNGRDSLMNPGVAMASHKDDDDRFFPSSGVLIFGKQGTGNDGVDYSQVLITDEEEIKATNPVATEEYGAVAINNQAANTQAQTGLVHNQGVIPGMVWQNRDVYLQGPIWAKIPHTDGNFHPSPLMGGFGLKHPPPQILIKNTPVPADPPLTFNQAKLNSFITQYSTGQVSVEIEWELQKENSKRWNPEIQYTSNYYKSTNVDFAVNTEGVYSEPRPIGTRYLTRNL

SEQ ID NO: 172 - protein, 736 aa, Adeno-Associated Virus; identical to SEQ ID NO: 171
  source 1..736: note = BMN_0313

SEQ ID NO: 173 - protein, 736 aa, Adeno-Associated Virus
  source 1..736: note = BMN_0314
MAADGYLPDWLEDNLSEGIREWWDLKPGAPKPKANQQKQDDGRGLVLPGYKYLGPFNGLDKGEPVNAADAAALEHDKAYDQQLKAGDNPYLRYNHADAEFQERLQEDTSFGGNLGRAVFQAKKRVLEPLGLVEEGAKTAPGKKRPVEQSPQEPDSSSGIGKTGQQPAKKRLNFGQTGDTESVPDPQPLREPPAAPSGLGPNTMASGGGAPMADNNEGADGVGNSSGNWHCDSTWLGDRVITTSTRTWALPTYNNHLYKQISNGTSGGSTNDNTYFGYSTPWGYFDFNRFHCHFSPRDWQRLINNNWGFRPKRLNFKPFNIQVKEVTTNEGTKTIANNPTSTVQVFTDSEYQLPYVLGSARQGCLPPFPADVFMVPQYGYLTLNNGSQALGRSSFYCLEYFPSQMLRTGDNFQFSYTFEDVPFHSSYAHSQSLDRLMNPLIDQYLYYLVRTQTTGTGGTQTLAFSQAGPSSMANQARNWVPGPCYRQQRVSTTTNQNNNSNFAWTGAAKFKLNGRDSLMNPGVAMASHKDDEDRFFPSSGVLIFGKQGAGNDGVDYSQVLITDEEEIKATNPVATEEYGAVAINNQAANTLAQTGLVHNQGVIPGMVWQNRDVYLQGPIWAKIPHTDGNFHPSPLMGGFGLKHPPPQILIKNTPVPADPPLTFNQAKLNSFITQYSTGQVSVEIEWELQKENSKRWNPEIQYTSNYYKSTNVDFAVNTEGVYSEPRPIGTRYLTRNL

SEQ ID NO: 174 - protein, 736 aa, Adeno-Associated Virus
  source 1..736: note = BMN_0315
MAADGYLPDWLEDNLSEGIREWWDLKPGAPKPKANQQKQDDGRGLVLPGYKYLGPFNGLDKGEPVNAADAAALEHDKAYDQQLKAGDNPYLRYNHADAEFQERLQEDTSFGGNLGRAVFQAKKRVLEPLGLVEEGANTAPGKKRPVEQSPQEPDSSSGIGKTGQQPAKKRLNFGQTGDSESVPDPQPLREPPAAPSGLGPNTMASGGGAPMADNNEGADGVGNSSGNWHCDSTWLGDRVITTSTRTWALPTYNNHLYKQISNGTSGGSTNDNTYFGYSTPWGYFDFNRFHCHFSPRDWQRLINSNWGFRPKRLNFKLFNIQVKEVTTNEGTKTIANNLTSTVQVFTDSEYQLPYVLGSAHQGCLPPFPADVFMVPQYGYLTLNNGSQALGRSSFYCLEYFPSQMLRTGNNFQFSYTFEDVPFHSSYAHSQSLDRLMNPLIDQYLYYLVRTQTTGTGGTQTLAFSQAGPSSMANQARNWVPGPCYRQQRVSTTTNQNNNSNFAWTGAAKFKLNGRDSLMNPGVAMASHKDDEDRFFPSSGVLIFGKQGAGNDGVDYSQVLITDEEEIKATNPVATEEYGAVAINNQAANTQAQTGLVHNQGVIPGMVWQNRDVYLQGPIWAKIPHTDGNFHPSPLMGGFGLKHPPPQILIKNTPVPADPPLTFNQAKLNSFITQYSTGQVSVEIEWELQKENSKRWNPEIQYTSNYYKSTNVDFAVNTEGVYSEPRPIGTRYLTRNL

SEQ ID NO: 175 - protein, 736 aa, Adeno-Associated Virus
  source 1..736: note = BMN_0316
MAADGYLPDWLEDNLSEGIREWWALKPGAPQPKANQQKQDDGRGLVLPGYKYLGPFNGLDKGEPVNEADAAALEHDKAYDQQLKAGDNPYLRYNHADAEFQERLQEDTSFGGNLGRAVFQAKKRVLEPLGLVEEAAKTAPGKKRPVEQSPQEPDSSAGIGKSGAQPAKKRLNFGQTGDTESVPDPQPIGEPPAAPSGVGSLTMASGGGAPVADNNEGADGVGSSSGNWHCDSQWLGDRVITTSTRTWALPTYNNHLYKQISNSTSGGSSNDNAYFGYSTPWGYFDFNRFHCHFSPRDWQRLINNNWGFRPKRLNFKLFNIQVKEVTDNNGVKTIANNLTSTVQVFTDSDYQLPYVLGSAHEGCLPPFPADVFMIPQYGYLTLNDGSQAVGRSSFYCLEYFPSQMLRTGNNFTFSYEFENVPFHSSYAHSQSLDRLMNPLIDQYLYYLSKTINGSGQNQQALKFSVAGPSNMAVQGRNYIPGPSYRQQRVSTTVTQNNNSEFAWPGASSWALNGRNSLMNPGPAMASHKEGEDRFFPLSGSLIFGKQGTGRDNVDADKVMITNEEEIKTTNPVATESYGQVATNHQSAQAQAQTGWVQNQGILPGMVWQDRDVYLQGPIWAKIPHTDGNFHPSPLVGGFGMKHPPPQILIKNTPVPADPPTAFNKDKLNSFITQYSTGQVRVEIEWELQKENSKRWNPEIQYTSNYYKSNNVEFAVNTEGVYSEPRPIGTRYLTRNL

SEQ ID NO: 176 - protein, 736 aa, Adeno-Associated Virus
  source 1..736: note = BMN_0317
MAADGYLPDWLEDNLSEGIREWWALKPGAPQPKANQQKQDDGRGLVLPGYKYLGPFNGLDKGEPVNEADAAALEHDKAYDQQLKAGDNPYLRYNHADAEFQERLQEDTSFGGNLGRAVFQAKKRVLEPLGLVEEAAKTAPGKKRPVEQSPQEPDSSAGIGKSGAQPAKKRLNFGQTGDTESVPDPQPIGEPPAAPSGVGSLTMASGGGAPVADNNEGADGVGSSSGNWHCDSQWLGDRVITTSTRTWALPTYNNHLYKQISNSTSGGSSNDNAYFGYSTPWGYFDFNRFHCHFSPRDWQRLINNNWGFRPKRLNFKLFNIQVKEVTDNNGVKTIANNLTSTVQVFTDSDYQLPYVLGSAHEGCLPPFPADVFMIPQYGYLTLNDGSQAVGRSSFYCLEYFPSQMPRTGNNFTFSYEFENVPFHSSYAHSQSLDRLMNPLIDQYLYYLSKTINGSGQNQQTLKFSVAGPSNMAVQGRNYIPGPSYRQQRVSTTVTQNNNSEFAWPGASSWALNGRNSLMNPGPAMASHKEGEDRFFPLSGSLIFGKQGTGRDNVDADKVMITNEEEIKTTNPVATESYGQVATNHQSAQAQAQTGWVQNQGILPGMVWQDRDVYLQGPIWAKIPHTDGNFHPSPLMGGFGMKHPPPQILIKNTPVPADPPTAFNKDKLNSFITQYSTGQVSVAIEWELQKENSKRWNPEIQYTSNYYKSNNVEFAVNTEGVYSEPRPIGTRYLTRNL

SEQ ID NO: 177 - protein, 736 aa, Adeno-Associated Virus
  source 1..736: note = BMN_0318
MAADGYLPDWLEDNLSEGIREWWALKPGAPQPKANQQKQDDGRGLVLPGYKYLGPFNGLDKGEPVNEADAAALEHDKAYDQQLKAGDNPYLRYNHADAEFQERLQEDTSFGGNLGRAVFQAKKRVLEPLGLVEEAAKTAPGKKRPVEQSPQEPDSSAGIGKSGAQPAKKRLNFGQTGDTESVPDPQPIGEPPAAPSGVGSLTMASGGGAPVADNNEGADGVGSSSGNWHCDSQWLGDRVITTSTRTWALPTYNNHLYKQISNSTSGGSSNDNAYFGYSTPWGYFDFNRFHCHFSPRDWQRLINNNWGFRPKRLNFKLFNIQVKEVTDNNGVKTIANNLTSTVQVFTDSDYQLPYVLGSAHEGCLPPFPADVFMIPQYGYLTLNDGSQAVGRSSFYCLEYFPSQMLRTGNNFTFSYEFENVPFHSSYAHSQSLDRPMNPLIDQYLYYLSKTINGSGQNQQTLKFSVAGPSNMAVQGRNYIPGPSYRQQRVSTTVTQNNNSEFAWPGASSWALNGRNSLMNPGPAMASHKEGEDRFFPLSGSLIFGKQGTGRDNVDADKVMITNEEEIKTTNPVATESYGQVATNHQSAQAQAQTGWVQNQGILPGMVWQDRDVYLQGPIWAKIPHTDGNFHPSPLMGGFGMKHPPPQILIKNTPVPADPPTAFNKDKLNSFITQYSTGQVSVEIEWELQKENSKRWNPEIQYTSNYYKSNNVEFAVNTEGVYSEPRPIGTRYLTRNL

SEQ ID NO: 178 - protein, 736 aa, Adeno-Associated Virus
  source 1..736: note = BMN_0319
MAADGYLPDWLEDNLSEGIREWWALKPGAPQPKANQQKQDDGRGLVLPGYKYLGPFNGLDKGEPVNEADAAALEHDKAYDQQLKAGDNPYLRYNHADAEFQERLQEDTSFGGNLGRAVFQAKKRVLEPLGLVEEAAKTAPGKKRPVEQSPQEPDSSAGIGKSGAQPAIKRLNFGQTGDTESVPDPQPIGEPPAAPSGVGSLTMASGGGAPVADNNEGADGVGSSSGNWHCDSQWLGDRVITTSIRTWALPTYNNHLYKQISNSTSGGSSNDNAYFGYSTPWGYFDFSRFHCHFSPRDWQRLINNNWGFRPKRLNFKLFNIQVKEVTDNNGVKTIANNLTSTVQVFTDSDYQLPYVLGSAHEGCLPPFPADVFMIPQYGYLTLNDGSQAVGRSSFYCLEYFPSQMLRTGNNFTFSYEFENVPFHSSYAHSQSLDRLMNPLIDQYLYYLSKTINGSGQNQQTLKFSVAGPSNMAVQGRNYIPGPSYRQQRVSTTVTQNNNSEFAWPGASSWALNGRNSLMNPGPAMASHKEGEDRFFPLSGSLIFGKQGTGRDNVDADKVMITNEEEIKTTNPVATESYGQVATNHQSAQAQAQTGWVQNQGILPGMVWQDRDVYLQGPIWAKIPHTDGNFHPSPLMGGFGMKHPPPQILIKNTPVPADPPTAFNKDKLNSFITQYSTGQVSVEIEWELQKENSKRWNPEIQYTSNYYKSNNVEFAVNTEGVYSEPRPIGTRYLTRNL

SEQ ID NO: 179 - protein, 736 aa, Adeno-Associated Virus
  source 1..736: note = BMN_0320
MAADGYLPDWLEDNLSEGIREWWALKPGAPQPKANQQKQDDGRGLVLPGYKYLGPFNGLDKGEPVNEADAAALEHDKAYDQQLKAGDNPYLRYNHADAEFQERLQEDTSFGGNLGRAVFQAKKRVLEPLGLVEEAAKTAPGKKRPVEQSPQEPDSSAGIGKSGAQPAKKRLNFGQTGDTESVPDPQPIGEPPAAPSGVGSLTMASGGGAPVADNNEGADGVGSSSGNWHCDSQWLGDRVITTSTRTWALPTYNNHLYKQISNSTSGGSSNDNAYFGYSTPWGYFDFNRFHCHFSPRDWQRLINNNWGFRPKRLNFKLFNIQVKEVTDNNGVKTIANNLTSTVQVFTDSDYQLPYVLGSAHEGCLPPFPADVFMIPQYGYLTLNDGSQAVGRSSFYCLEYFPSQMLRTGNNFTFSYEFENVPFHSSYAHSQSLDRLMNPLIDQYLYYLSKTINGSGQNQQTLKFSVAGPSNMAVQGRNYIPGPSYRQQRVSTTVTQNNNSEFAWPGASSWALNGRNSLMNPGPAMASHKEGEDRFFPLSGSLIFGKQGTGRDNVDADKVMITNEEEIKTTNPVATESYGQVATNHQSAQAQAQTGWVQNQGILPGMVWQDRDVYLQGPIWAKIPHTDGNFHPSPLMGGFGMKHPPPQILIKNTPVPADPPTAFNKDKLNSFITQYSTGQVSVEIEWELQKENSKRWNPEIQYTSNYYKSNNVEFAVNTEGVYSEPRPIGTRYLTRNL

SEQ ID NO: 180 - protein, 736 aa, Adeno-Associated Virus
  source 1..736: note = BMN_0321
MAADGYLPDWLEDNLSEGIREWWALKPGAPQPKANQQKQDDGRGLVLPGYKYLGPFNGLDKGEPVNEADAAALEHDKAYDQQLKAGDNPYLRYNHADAEFQERLQEDTSFGGNLGRAVFQAKKRVLEPLGLVEEAAKTAPGKKRPVEQSPQEPDSSAGIGKSGAQPAKKRLNFGQTGDTESVPDPQPIGEPPAAPSGVGSLTMASGGGAPVADNNEGADGVGSSSGNWHCDSRWLGDRVITTSTRTWALPTYNNHLYKQISNSTSGGSSNDNAYFGYSTPWGYFDFNRFHCHFSPRDWQRLINNNWGFRPKRLNFKLFNIQVKEVTDNNGAKTIANNLTSTVQVFTDSDYQLPYVLGSAHEGCLPPFPADVFMIPQYGYLTLNDGSQAVGRSSFYCLEYFPSQMLRTGNNFTFSYEFENVPFHSSYAHSQSLDRLMNPLIDQYLYYLSKTINGSGQNQQTLKFSVAGPSNMAVQGRNYIPGPSYRQQRVSTTVTQNNNSEFAWPGASSWALNGRNSLMNPGPAMASHKEGEDRFFPLSGSLIFGKQGTGRDNVDADKVMITNEEEIKTTNPVATESYGQVATNHQSAQAQAQTGWVQNQGILPGMVWQDRDVYLQGPIWAKIPHTDGNFHPSPLMGGFGMKHPPPQILIKNTPVPADPPTAFNKDKLNSFITQYSTGQVSVEIEWELQKENSKRWNPEIQYTSNYYKSNNVEFAVNTEGVYSEPRPIGTRYLTRNL

SEQ ID NO: 181 - DNA, 2211 bp, Adeno-Associated Virus
  source 1..2211: mol_type = other DNA; note = AAV-LK03
atggctgctgacggttatcttccagattggctcgaggacaacctttctgaaggcattcgagagtggtgggcgctgcaacctggagcccctaaacccaaggcaaatcaacaacatcaggacaacgctcggggtcttgtgcttccgggttacaaatacctcggacccggcaacggactcgacaagggggaacccgtcaacgcagcggacgcggcagccctcgagcacgacaaggcctacgaccagcagctcaaggccggtgacaacccctacctcaagtacaaccacgccgacgccgagttccaggagcggctcaaagaagatacgtcttttgggggcaacctcgggcgagcagtcttccaggccaaaaagaggcttcttgaacctcttggtctggttgaggaagcggctaagacggctcctggaaagaagaggcctgtagatcagtctcctcaggaaccggactcatcatctggtgttggcaaatcgggcaaacagcctgccagaaaaagactaaatttcggtcagactggcgactcagagtcagtcccagaccctcaacctctcggagaaccaccagcagcccccacaagtttgggatctaatacaatggcttcaggcggtggcgcaccaatggcagacaataacgagggtgccgatggagtgggtaattcctcaggaaattggcattgcgattcccaatggctgggcgacagagtcatcaccaccagcaccagaacctgggccctgcccacttacaacaaccatctctacaagcaaatctccagccaatcaggagcttcaaacgacaaccactactttggctacagcaccccttgggggtattttgactttaacagattccactgccacttctcaccacgtgactggcagcgactcattaacaacaactggggattccggcccaagaaactcagcttcaagctcttcaacatccaagttaaagaggtcacgcagaacgatggcacgacgactattgccaataaccttaccagcacggttcaagtgtttacggactcggagtatcagctcccgtacgtgctcgggtcggcgcaccaaggctgtctcccgccgtttccagcggacgtcttcatggtccctcagtatggatacctcaccctgaacaacggaagtcaagcggtgggacgctcatccttttactgcctggagtacttcccttcgcagatgctaaggactggaaataacttccaattcagctataccttcgaggatgtaccttttcacagcagctacgctcacagccagagtttggatcgcttgatgaatcctcttattgatcagtatctgtactacctgaacagaacgcaaggaacaacctctggaacaaccaaccaatcacggctgctttttagccaggctgggcctcagtctatgtctttgcaggccagaaattggctacctgggccctgctaccggcaacagagactttcaaagactgctaacgacaacaacaacagtaactttccttggacagcggccagcaaatatcatctcaatggccgcgactcgctggtgaatccaggaccagctatggccagtcacaaggacgatgaagaaaaatttttccctatgcacggcaatctaatatttggcaaagaagggacaacggcaagtaacgcagaattagataatgtaatgattacggatgaagaagagattcgtaccaccaatcctgtggcaacagagcagtatggaactgtggcaaataacttgcagagctcaaatacagctcccacgactagaactgtcaatgatcagggggccttacctggcatggtgtggcaagatcgtgacgtgtaccttcaaggacctatctgggcaaagattcctcacacggatggacactttcatccttctcctctgatgggaggctttggactgaaacatccgcctcctcaaatcatgatcaaaaatactccggtaccggcaaatcctccgacgactttcagcccggccaagtttgcttcatttatcactcagtactccactggacaggtcagcgtggaaattgagtgggagctacagaaagaaaacagcaaacgttggaatccagagattcagtacacttccaactacaacaagtctgttaatgtggactttactgtagacactaatggtgtttatagtgaacctcgccccattggcacccgttaccttacccgtcccctgtaa

SEQ ID NO: 182 - DNA, 2181 bp, Adeno-Associated Virus
  source 1..2181: mol_type = other DNA; note = AAV-po.6
atgtcgtttgttgatcaccctccagattggttagaagaagttggtgaaggccttcacgagtttttggagctcgaagctggcccacccaaaccgaagcccaaccagcagaagcaggacaacgcccgtggtcttgtactgcctggatataattatctgggacccttcaacggactcgacaagggagagcccgtcaaccgagcggacgctgttgcgcgagagcacgacatctcgtacaacgagcagctccaggcgggagacaacccctacctcaagtacaaccacgcggacgccgagtttcaggagaagctcaaggacgacacctcctttgggggcaacctcggaaaggcaatctttcaggccaagaaaagggttctcgaaccttttggcctggttgaggcacctgttaagacggctccagccaagaagcggccgatagagaagtctccggcggaaccgagctcttcgaagggcatcggcaaggcgggccagcagcctgcgaggaagcgactcaactttggtcagactggagacaccgactccgccgctgacccccagcctctcggagaaccaccagcagccccctctggtctgggaactggtacgatggcttcaggcagtggcgcaccaatggcagacaataacgaaggcgccgacggagtgggtaatgcctcgggaaattggcattgcgattccacatggctgggcgaccgagtcatcaccaccagcacccgcacctgggccctgcccacctacaacaaccatctctacaagcaaatctccagccagtctggagccaacaacgacaaccactactttggctacagcaccccctgggggtactttgacttcaaccgcttccactgccacttctccccgcgagactggcagcggctcatcaacaacaactgggggttccggcccaagcgactcaacttcaagctcttcaacatccaagtcaaggaggtcactcagacggacggcacgaagaccatcgccaataaccttaccagcacggttcaggtctttgcggactcggagtaccagctcccatacgtcctcggatcggcgcaccagggctgcttcccaccgttcccggcggacgtctttatggtcccgcaatacgggtacttgacgctgaacaacggcagccaggccatgggccgctcttccttctactgcctggagtactttccatcgcagatgctgcgaacagggaacaacttcacgttcagctacaccttcgaggacgtgcccttccacagcagctacgcccacagccagagcctggaccggctcatgaatcctctcatcgaccagtatctatactacttgagcaagacacagaacggcttgggcttttctcaggcgggacacaacagcatgcgggatcagtctaggaactggctgccggggccttgcttcagacagcagcgaatatcgaaaacacctacgcaaaataatactggagactttgcgtggacaggaactacaagatatcacctcaacggcagaaactcggcgatgaatccgggtccggccatggccagccacaaggatgacgaggaaagattctttcctcaaaatggtgtactcatctttggaaaagaagatgcagaaaaaaacaatgcggtgcttgacaaagtgatcatcactgacgaggaggaaatcagaaccacgaaccctgtggccacgggagaatacgggctcgttgctaccaacttccaaaacaatacaacagcagcagatacagagatggtcaacgcacagggcatcctacccggcatggtgtggcaagaccgagatgtgtatctgcagggacccatctgggctaagattccccacacggacggacactttcatccctcgccgctcatgggcgggttcggcctcaagcgcccgcctccgcaaatcctcattaagaacactcccgtaccagcggatcccgccacgaccttcaacccggcgaagctagcgtccttcatcacgcagtactccacgggccaggtcagcgtggaaatcgagtgggagcttcagaaggagaacagcaagcgctggaaccccgaggtccagtacacgtccaactacaacaagtccgtcaacgtggaatttacagtggacaacaacggcgtgtattcggaaccgcgcaccatcggcacccgctaccttactcgtaatctgtaa

SEQ ID NO: 183 - DNA, 2211 bp, Adeno-Associated Virus
  source 1..2211: mol_type = other DNA; note = AAV-1
atggctgccgatggttatcttccagattggctcgaggacaacctctctgagggcattcgcgagtggtgggacttgaaacctggagccccgaagcccaaagccaaccagcaaaagcaggacgacggccggggtctggtgcttcctggctacaagtacctcggacccttcaacggactcgacaagggggagcccgtcaacgcggcggacgcagcggccctcgagcacgacaaggcctacgaccagcagctcaaagcgggtgacaatccgtacctgcggtataaccacgccgacgccgagtttcaggagcgtctgcaagaagatacgtcttttgggggcaacctcgggcgagcagtcttccaggccaagaagcgggttctcgaacctctcggtctggttgaggaaggcgctaagacggctcctggaaagaaacgtccggtagagcagtcgccacaagagccagactcctcctcgggcatcggcaagacaggccagcagcccgctaaaaagagactcaattttggtcagactggcgactcagagtcagtccccgatccacaacctctcggagaacctccagcaacccccgctgctgtgggacctactacaatggcttcaggcggtggcgcaccaatggcagacaataacgaaggcgccgacggagtgggtaatgcctcaggaaattggcattgcgattccacatggctgggcgacagagtcatcaccaccagcacccgcacctgggccttgcccacctacaataaccacctctacaagcaaatctccagtgcttcaacgggggccagcaacgacaaccactacttcggctacagcaccccctgggggtattttgatttcaacagattccactgccacttttcaccacgtgactggcagcgactcatcaacaacaattggggattccggcccaagagactcaacttcaaactcttcaacatccaagtcaaggaggtcacgacgaatgatggcgtcacaaccatcgctaataaccttaccagcacggttcaagtcttctcggactcggagtaccagcttccgtacgtcctcggctctgcgcaccagggctgcctccctccgttcccggcggacgtgttcatgattccgcaatacggctacctgacgctcaacaatggcagccaagccgtgggacgttcatccttttactgcctggaatatttcccttctcagatgctgagaacgggcaacaactttaccttcagctacacctttgaggaagtgcctttccacagcagctacgcgcacagccagagcctggaccggctgatgaatcctctcatcgaccaatacctgtattacctgaacagaactcaaaatcagtccggaagtgcccaaaacaaggacttgctgtttagccgtgggtctccagctggcatgtctgttcagcccaaaaactggctacctggaccctgttatcggcagcagcgcgtttctaaaacaaaaacagacaacaacaacagcaattttacctggactggtgcttcaaaatataacctcaatgggcgtgaatccatcatcaaccctggcactgctatggcctcacacaaagacgacgaagacaagttctttcccatgagcggtgtcatgatttttggaaaagagagcgccggagcttcaaacactgcattggacaatgtcatgattacagacgaagaggaaattaaagccactaaccctgtggccaccgaaagatttgggaccgtggcagtcaatttccagagcagcagcacagaccctgcgaccggagatgtgcatgctatgggagcattacctggcatggtgtggcaagatagagacgtgtacctgcagggtcccatttgggccaaaattcctcacacagatggacactttcacccgtctcctcttatgggcggctttggactcaagaacccgcctcctcagatcctcatcaaaaacacgcctgttcctgcgaatcctccggcggagttttcagctacaaagtttgcttcattcatcacccaatactccacaggacaagtgagtgtggaaattgaatgggagctgcagaaagaaaacagcaagcgctggaatcccgaagtgcagtacacatccaattatgcaaaatctgccaacgttgattttactgtggacaacaatggactttatactgagcctcgccccattggcacccgttaccttacccgtcccctgtaa

SEQ ID NO: 184 - DNA, 2208 bp, Adeno-Associated Virus
  source 1..2208: mol_type = other DNA; note = AAV-2
atggctgccgatggttatcttccagattggctcgaggacactctctctgaaggaataagacagtggtggaagctcaaacctggcccaccaccaccaaagcccgcagagcggcataaggacgacagcaggggtcttgtgcttcctgggtacaagtacctcggacccttcaacggactcgacaagggagagccggtcaacgaggcagacgccgcggccctcgagcacgacaaagcctacgaccggcagctcgacagcggagacaacccgtacctcaagtacaaccacgccgacgcggagtttcaggagcgccttaaagaagatacgtcttttgggggcaacctcggacgagcagtcttccaggcgaaaaagagggttcttgaacctctgggcctggttgaggaacctgttaagacggctccgggaaaaaagaggccggtagagcactctcctgtggagccagactcctcctcgggaaccggaaaggcgggccagcagcctgcaagaaaaagattgaattttggtcagactggagacgcagactcagtacctgacccccagcctctcggacagccaccagcagccccctctggtctgggaactaatacgatggctacaggcagtggcgcaccaatggcagacaataacgagggcgccgacggagtgggtaattcctcgggaaattggcattgcgattccacatggatgggcgacagagtcatcaccaccagcacccgaacctgggccctgcccacctacaacaaccacctctacaaacaaatttccagccaatcaggagcctcgaacgacaatcactactttggctacagcaccccttgggggtattttgacttcaacagattccactgccacttttcaccacgtgactggcaaagactcatcaacaacaactggggattccgacccaagagactcaacttcaagctctttaacattcaagtcaaagaggtcacgcagaatgacggtacgacgacgattgccaataaccttaccagcacggttcaggtgtttactgactcggagtaccagctcccgtacgtcctcggctcggcgcatcaaggatgcctcccgccgttcccagcagacgtcttcatggtgccacagtatggatacctcaccctgaacaacgggagtcaggcagtaggacgctcttcattttactgcctggagtactttccttctcagatgctgcgtaccggaaacaactttaccttcagctacacttttgaggacgttcctttccacagcagctacgctcacagccagagtctggaccgtctcatgaatcctctcatcgaccagtacctgtattacttgagcagaacaaacactccaagtggaaccaccacgcagtcaaggcttcagttttctcaggccggagcgagtgacattcgggaccagtctaggaactggcttcctggaccctgttaccgccagcagcgagtatcaaagacatctgcggataacaacaacagtgaatactcgtggactggagctaccaagtaccacctcaatggcagagactctctggtgaatccgggcccggccatggcaagccacaaggacgatgaagaaaagttttttcctcagagcggggttctcatctttgggaagcaaggctcagagaaaacaaatgtggacattgaaaaggtcatgattacagacgaagaggaaatcaggacaaccaatcccgtggctacggagcagtatggttctgtatctaccaacctccagagaggcaacagacaagcagctaccgcagatgtcaacacacaaggcgttcttccaggcatggtctggcaggacagagatgtgtaccttcaggggcccatctgggcaaagattccacacacggacggacattttcacccctctcccctcatgggtggattcggacttaaacaccctcctccacagattctcatcaagaacaccccggtacctgcgaatccttcgaccaccttcagtgcggcaaagtttgcttccttcatcacacagtactccacgggacaggtcagcgtggagatcgagtgggagctgcagaaggaaaacagcaaacgctggaatcccgaaattcagtacacttccaactacaacaagtctgttaatgtggactttactgtggacactaatggcgtgtattcagagcctcgccccattggcaccagatacctgactcgtaatctgtaa

SEQ ID NO: 185 - DNA, 2211 bp, Adeno-Associated Virus
  source 1..2211: mol_type = other DNA; note = AAV-3b
atggctgctgacggttatcttccagattggctcgaggacaacctttctgaaggcattcgtgagtggtgggctctgaaacctggagtccctcaacccaaagcgaaccaacaacaccaggacaaccgtcggggtcttgtgcttccgggttacaaatacctcggacccggtaacggactcgacaaaggagagccggtcaacgaggcggacgcggcagccctcgaacacgacaaagcttacgaccagcagctcaaggccggtgacaacccgtacctcaagtacaaccacgccgacgccgagtttcaggagcgtcttcaagaagatacgtcttttgggggcaaccttggcagagcagtcttccaggccaaaaagaggatccttgagcctcttggtctggttgaggaagcagctaaaacggctcctggaaagaagaggcctgtagatcagtctcctcaggaaccggactcatcatctggtgttggcaaatcgggcaaacagcctgccagaaaaagactaaatttcggtcagactggcgactcagagtcagtcccagaccctcaacctctcggagaaccaccagcagcccccacaagtttgggatctaatacaatggcttcaggcggtggcgcaccaatggcagacaataacgagggtgccgatggagtgggtaattcctcaggaaattggcattgcgattcccaatggctgggcgacagagtcatcaccaccagcaccagaacctgggccctgcccacttacaacaaccatctctacaagcaaatctccagccaatcaggagcttcaaacgacaaccactactttggctacagcaccccttgggggtattttgactttaacagattccactgccacttctcaccacgtgactggcagcgactcattaacaacaactggggattccggcccaagaaactcagcttcaagctcttcaacatccaagttaaagaggtcacgcagaacgatggcacgacgactattgccaataaccttaccagcacggttcaagtgtttacggactcggagtatcagctcccgtacgtgctcgggtcggcgcaccaaggctgtctcccgccgtttccagcggacgtcttcatggtccctcagtatggatacctcaccctgaacaacggaagtcaagcggtgggacgctcatccttttactgcctggagtacttcccttcgcagatgctaaggactggaaataacttccaattcagctataccttcgaggatgtaccttttcacagcagctacgctcacagccagagtttggatcgcttgatgaatcctcttattgatcagtatctgtactacctgaacagaacgcaaggaacaacctctggaacaaccaaccaatcacggctgctttttagccaggctgggcctcagtctatgtctttgcaggccagaaattggctacctgggccctgctaccggcaacagagactttcaaagactgctaacgacaacaacaacagtaactttccttggacagcggccagcaaatatcatctcaatggccgcgactcgctggtgaatccaggaccagctatggccagtcacaaggacgatgaagaaaaatttttccctatgcacggcaatctaatatttggcaaagaagggacaacggcaagtaacgcagaattagataatgtaatgattacggatgaagaagagattcgtaccaccaatcctgtggcaacagagcagtatggaactgtggcaaataacttgcagagctcaaatacagctcccacgactagaactgtcaatgatcagggggccttacctggcatggtgtggcaagatcgtgacgtgtaccttcaaggacctatctgggcaaagattcctcacacggatggacactttcatccttctcctctgatgggaggctttggactgaaacatccgcctcctcaaatcatgatcaaaaatactccggtaccggcaaatcctccgacgactttcagcccggccaagtttgcttcatttatcactcagtactccactggacaggtcagcgtggaaattgagtgggagctacagaaagaaaacagcaaacgttggaatccagagattcagtacacttccaactacaacaagtctgttaatgtggactttactgtagacactaatggtgtttatagtgaacctcgccctattggaacccggtatctcacacgaaacttgtaa

SEQ ID NO: 186 - DNA, 2211 bp, Adeno-Associated Virus
  source 1..2211: mol_type = other DNA; note = AAV-6
atggctgccgatggttatcttccagattggctcgaggacaacctctctgagggcattcgcgagtggtgggacttgaaacctggagccccgaaacccaaagccaaccagcaaaagcaggacgacggccggggtctggtgcttcctggctacaagtacctcggacccttcaacggactcgacaagggggagcccgtcaacgcggcggatgcagcggccctcgagcacgacaaggcctacgaccagcagctcaaagcgggtgacaatccgtacctgcggtataaccacgccgacgccgagtttcaggagcgtctgcaagaagatacgtcttttgggggcaacctcgggcgagcagtcttccaggccaagaagagggttctcgaaccttttggtctggttgaggaaggtgctaagacggctcctggaaagaaacgtccggtagagcagtcgccacaagagccagactcctcctcgggcattggcaagacaggccagcagcccgctaaaaagagactcaattttggtcagactggcgactcagagtcagtccccgacccacaacctctcggagaacctccagcaacccccgctgctgtgggacctactacaatggcttcaggcggtggcgcaccaatggcagacaataacgaaggcgccgacggagtgggtaatgcctcaggaaattggcattgcgattccacatggctgggcgacagagtcatcaccaccagcacccgaacatgggccttgcccacctataacaaccacctctacaagcaaatctccagtgcttcaacgggggccagcaacgacaaccactacttcggctacagcaccccctgggggtattttgatttcaacagattccactgccatttctcaccacgtgactggcagcgactcatcaacaacaattggggattccggcccaagagactcaacttcaagctcttcaacatccaagtcaaggaggtcacgacgaatgatggcgtcacgaccatcgctaataaccttaccagcacggttcaagtcttctcggactcggagtaccagttgccgtacgtcctcggctctgcgcaccagggctgcctccctccgttcccggcggacgtgttcatgattccgcagtacggctacctaacgctcaacaatggcagccaggcagtgggacggtcatccttttactgcctggaatatttcccatcgcagatgctgagaacgggcaataactttaccttcagctacaccttcgaggacgtgcctttccacagcagctacgcgcacagccagagcctggaccggctgatgaatcctctcatcgaccagtacctgtattacctgaacagaactcagaatcagtccggaagtgcccaaaacaaggacttgctgtttagccgggggtctccagctggcatgtctgttcagcccaaaaactggctacctggaccctgttaccggcagcagcgcgtttctaaaacaaaaacagacaacaacaacagcaactttacctggactggtgcttcaaaatataaccttaatgggcgtgaatctataatcaaccctggcactgctatggcctcacacaaagacgacaaagacaagttctttcccatgagcggtgtcatgatttttggaaaggagagcgccggagcttcaaacactgcattggacaatgtcatgatcacagacgaagaggaaatcaaagccactaaccccgtggccaccgaaagatttgggactgtggcagtcaatctccagagcagcagcacagaccctgcgaccggagatgtgcatgttatgggagccttacctggaatggtgtggcaagacagagacgtatacctgcagggtcctatttgggccaaaattcctcacacggatggacactttcacccgtctcctctcatgggcggctttggacttaagcacccgcctcctcagatcctcatcaaaaacacgcctgttcctgcgaatcctccggcagagttttcggctacaaagtttgcttcattcatcacccagtattccacaggacaagtgagcgtggagattgaatgggagctgcagaaagaaaacagcaaacgctggaatcccgaagtgcagtatacatctaactatgcaaaatctgccaacgttgatttcactgtggacaacaatggactttatactgagcctcgccccattggcacccgttacctcacccgtcccctgtaa

SEQ ID NO: 187 - DNA, 2214 bp, Adeno-Associated Virus
  source 1..2214: mol_type = other DNA; note = AAV-7
atggctgccgatggttatcttccagattggctcgaggacaacctctctgagggcattcgcgagtggtgggacctgaaacctggagccccgaaacccaaagccaaccagcaaaagcaggacaacggccggggtctggtgcttcctggctacaagtacctcggacccttcaacggactcgacaagggggagcccgtcaacgcggcggacgcagcggccctcgagcacgacaaggcctacgaccagcagctcaaagcgggtgacaatccgtacctgcggtataaccacgccgacgccgagtttcaggagcgtctgcaagaagatacgtcatttgggggcaacctcgggcgagcagtcttccaggccaagaagcgggttctcgaacctctcggtctggttgaggaaggcgctaagacggctcctgcaaagaagagaccggtagagccgtcacctcagcgttcccccgactcctccacgggcatcggcaagaaaggccagcagcccgccagaaagagactcaatttcggtcagactggcgactcagagtcagtccccgaccctcaacctctcggagaacctccagcagcgccctctagtgtgggatctggtacagtggctgcaggcggtggcgcaccaatggcagacaataacgaaggtgccgacggagtgggtaatgcctcaggaaattggcattgcgattccacatggctgggcgacagagtcattaccaccagcacccgaacctgggccctgcccacctacaacaaccacctctacaagcaaatctccagtgaaactgcaggtagtaccaacgacaacacctacttcggctacagcaccccctgggggtattttgactttaacagattccactgccacttctcaccacgtgactggcagcgactcatcaacaacaactggggattccggcccaagaagctgcggttcaagctcttcaacatccaggtcaaggaggtcacgacgaatgacggcgttacgaccatcgctaataaccttaccagcacgattcaggtattctcggactcggaataccagctgccgtacgtcctcggctctgcgcaccagggctgcctgcctccgttcccggcggacgtcttcatgattcctcagtacggctacctgactctcaacaatggcagtcagtctgtgggacgttcctccttctactgcctggagtacttcccctctcagatgctgagaacgggcaacaactttgagttcagctacagcttcgaggacgtgcctttccacagcagctacgcacacagccagagcctggaccggctgatgaatcccctcatcgaccagtacttgtactacctggccagaacacagagtaacccaggaggcacagctggcaatcgggaactgcagttttaccagggcgggccttcaactatggccgaacaagccaagaattggttacctggaccttgcttccggcaacaaagagtctccaaaacgctggatcaaaacaacaacagcaactttgcttggactggtgccaccaaatatcacctgaacggcagaaactcgttggttaatcccggcgtcgccatggcaactcacaaggacgacgaggaccgctttttcccatccagcggagtcctgatttttggaaaaactggagcaactaacaaaactacattggaaaatgtgttaatgacaaatgaagaagaaattcgtcctactaatcctgtagccacggaagaatacgggatagtcagcagcaacttacaagcggctaatactgcagcccagacacaagttgtcaacaaccagggagccttacctggcatggtctggcagaaccgggacgtgtacctgcagggtcccatctgggccaagattcctcacacggatggcaactttcacccgtctcctttgatgggcggctttggacttaaacatccgcctcctcagatcctgatcaagaacactcccgttcccgctaatcctccggaggtgtttactcctgccaagtttgcttcgttcatcacacagtacagcaccggacaagtcagcgtggaaatcgagtgggagctgcagaaggaaaacagcaagcgctggaacccggagattcagtacacctccaactttgaaaagcagactggtgtggactttgccgttgacagccagggtgtttactctgagcctcgccctattggcactcgttacctcacccgtaatctgtaa

SEQ ID NO: 188 - DNA, 2217 bp, Adeno-Associated Virus
  source 1..2217: mol_type = other DNA; note = AAV-8
atggctgccgatggttatcttccagattggctcgaggacaacctctctgagggcattcgcgagtggtgggcgctgaaacctggagccccgaagcccaaagccaaccagcaaaagcaggacgacggccggggtctggtgcttcctggctacaagtacctcggacccttcaacggactcgacaagggggagcccgtcaacgcggcggacgcagcggccctcgagcacgacaaggcctacgaccagcagctgcaggcgggtgacaatccgtacctgcggtataaccacgccgacgccgagtttcaggagcgtctgcaagaagatacgtcttttgggggcaacctcgggcgagcagtcttccaggccaagaagcgggttctcgaacctctcggtctggttgaggaaggcgctaagacggctcctggaaagaagagaccggtagagccatcaccccagcgttctccagactcctctacgggcatcggcaagaaaggccaacagcccgccagaaaaagactcaattttggtcagactggcgactcagagtcagttccagaccctcaacctctcggagaacctccagcagcgccctctggtgtgggacctaatacaatggctgcaggcggtggcgcaccaatggcagacaataacgaaggcgccgacggagtgggtagttcctcgggaaattggcattgcgattccacatggctgggcgacagagtcatcaccaccagcacccgaacctgggccctgcccacctacaacaaccacctctacaagcaaatctccaacgggacatcgggaggagccaccaacgacaacacctacttcggctacagcaccccctgggggtattttgactttaacagattccactgccacttttcaccacgtgactggcagcgactcatcaacaacaactggggattccggcccaagagactcagcttcaagctcttcaacatccaggtcaaggaggtcacgcagaatgaaggcaccaagaccatcgccaataacctcaccagcaccatccaggtgtttacggactcggagtaccagctgccgtacgttctcggctctgcccaccagggctgcctgcctccgttcccggcggacgtgttcatgattccccagtacggctacctaacactcaacaacggtagtcaggccgtgggacgctcctccttctactgcctggaatactttccttcgcagatgctgagaaccggcaacaacttccagtttacttacaccttcgaggacgtgcctttccacagcagctacgcccacagccagagcttggaccggctgatgaatcctctgattgaccagtacctgtactacttgtctcggactcaaacaacaggaggcacggcaaatacgcagactctgggcttcagccaaggtgggcctaatacaatggccaatcaggcaaagaactggctgccaggaccctgttaccgccaacaacgcgtctcaacgacaaccgggcaaaacaacaatagcaactttgcctggactgctgggaccaaataccatctgaatggaagaaattcattggctaatcctggcatcgctatggcaacacacaaagacgacgaggagcgtttttttcccagtaacgggatcctgatttttggcaaacaaaatgctgccagagacaatgcggattacagcgatgtcatgctcaccagcgaggaagaaatcaaaaccactaaccctgtggctacagaggaatacggtatcgtggcagataacttgcagcagcaaaacacggctcctcaaattggaactgtcaacagccagggggccttacccggtatggtctggcagaaccgggacgtgtacctgcagggtcccatctgggccaagattcctcacacggacggcaacttccacccgtctccgctgatgggcggctttggcctgaaacatcctccgcctcagatcctgatcaagaacacgcctgtacctgcggatcctccgaccaccttcaaccagtcaaagctgaactctttcatcacgcaatacagcaccggacaggtcagcgtggaaattgaatgggagctgcagaaggaaaacagcaagcgctggaaccccgagatccagtacacctccaactactacaaatctacaagtgtggactttgctgttaatacagaaggcgtgtactctgaaccccgccccattggcacccgttacctcacccgtaatctgtaa

SEQ ID NO: 189 - DNA, 2211 bp, Adeno-Associated Virus
  source 1..2211: mol_type = other DNA; note = AAV-9
atggctgccgatggttatcttccagattggctcgaggacaaccttagtgaaggaattcgcgagtggtgggctttgaaacctggagcccctcaacccaaggcaaatcaacaacatcaagacaacgctcgaggtcttgtgcttccgggttacaaataccttggacccggcaacggactcgacaagggggagccggtcaacgcagcagacgcggcggccctcgagcacgacaaggcctacgaccagcagctcaaggccggagacaacccgtacctcaagtacaaccacgccgacgccgagttccaggagcggctcaaagaagatacgtcttttgggggcaacctcgggcgagcagtcttccaggccaaaaagaggcttcttgaacctcttggtctggttgaggaagcggctaagacggctcctggaaagaagaggcctgtagagcagtctcctcaggaaccggactcctccgcgggtattggcaaatcgggtgcacagcccgctaaaaagagactcaatttcggtcagactggcgacacagagtcagtcccagaccctcaaccaatcggagaacctcccgcagccccctcaggtgtgggatctcttacaatggcttcaggtggtggcgcaccagtggcagacaataacgaaggtgccgatggagtgggtagttcctcgggaaattggcattgcgattcccaatggctgggggacagagtcatcaccaccagcacccgaacctgggccctgcccacctacaacaatcacctctacaagcaaatctccaacagcacatctggaggatcttcaaatgacaacgcctacttcggctacagcaccccctgggggtattttgacttcaacagattccactgccacttctcaccacgtgactggcagcgactcatcaacaacaactggggattccggcctaagcgactcaacttcaagctcttcaacattcaggtcaaagaggttacggacaacaatggagtcaagaccatcgccaataaccttaccagcacggtccaggtcttcacggactcagactatcagctcccgtacgtgctcgggtcggctcacgagggctgcctcccgccgttcccagcggacgttttcatgattcctcagtacgggtatctgacgcttaatgatggaagccaggccgtgggtcgttcgtccttttactgcctggaatatttcccgtcgcaaatgctaagaacgggtaacaacttccagttcagctacgagtttgagaacgtacctttccatagcagctacgctcacagccaaagcctggaccgactaatgaatccactcatcgaccaatacttgtactatctctcaaagactattaacggttctggacagaatcaacaaacgctaaaattcagtgtggccggacccagcaacatggctgtccagggaagaaactacatacctggacccagctaccgacaacaacgtgtctcaaccactgtgactcaaaacaacaacagcgaatttgcttggcctggagcttcttcttgggctctcaatggacgtaatagcttgatgaatcctggacctgctatggccagccacaaagaaggagaggaccgtttctttcctttgtctggatctttaatttttggcaaacaaggaactggaagagacaacgtggatgcggacaaagtcatgataaccaacgaagaagaaattaaaactactaacccggtagcaacggagtcctatggacaagtggccacaaaccaccagagtgcccaagcacaggcgcagaccggctgggttcaaaaccaaggaatacttccgggtatggtttggcaggacagagatgtgtacctgcaaggacccatttgggccaaaattcctcacacggacggcaactttcacccttctccgctgatgggagggtttggaatgaagcacccgcctcctcagatcctcatcaaaaacacacctgtacctgcggatcctccaacggccttcaacaaggacaagctgaactctttcatcacccagtattctactggccaagtcagcgtggagatcgagtgggagctgcagaaggaaaacagcaagcgctggaacccggagatccagtacacttccaactattacaagtctaataatgttgaatttgctgttaatactgaaggtgtatatagtgaaccccgccccattggcaccagatacctgactcgtaatctgtaa

SEQ ID NO: 190 - DNA, 2217 bp, Adeno-Associated Virus
  source 1..2217: mol_type = other DNA; note = AAV-10
atggctgctgacggttatcttccagattggctcgaggacaacctctctgagggcattcgcgagtggtgggacctgaaacctggagcccccaagcccaaggccaaccagcagaagcaggacgacggccggggtctggtgcttcctggctacaagtacctcggacccttcaacggactcgacaagggggagcccgtcaacgcggcggacgcagcggccctcgagcacgacaaggcctacgaccagcagctcaaagcgggtgacaatccgtacctgcggtataaccacgccgacgccgagtttcaggagcgtctgcaagaagatacgtcttttgggggcaacctcgggcgagcagtcttccaggccaagaagcgggttctcgaacctctcggtctggttgaggaagctgctaagacggctcctggaaagaagagaccggtagaaccgtcacctcagcgttcccccgactcctccacgggcatcggcaagaaaggccagcagcccgctaaaaagagactgaactttgggcagactggcgagtcagagtcagtccccgaccctcaaccaatcggagaaccaccagcaggcccctctggtctgggatctggtacaatggctgcaggcggtggcgctccaatggcagacaataacgaaggcgccgacggagtgggtagttcctcaggaaattggcattgcgattccacatggctgggcgacagagtcatcaccaccagcacccgaacctgggccctgcccacctacaacaaccacctctacaagcaaatctccaacgggacatcgggaggaagcaccaacgacaacacctacttcggctacagcaccccctgggggtattttgacttcaacagattccactgccacttctcaccacgtgactggcagcgactcatcaacaacaactggggattccggccaaaaagactcagcttcaagctcttcaacatccaggtcaaggaggtcacgcagaatgaaggcaccaagaccatcgccaataaccttaccagcacgattcaggtatttacggactcggaataccagctgccgtacgtcctcggctccgcgcaccagggctgcctgcctccgttcccggcggatgtcttcatgattccccagtacggctacctgacactgaacaatggaagtcaagccgtaggccgttcctccttctactgcctggaatattttccatctcaaatgctgcgaactggaaacaattttgaattcagctacaccttcgaggacgtgcctttccacagcagctacgcacacagccagagcttggaccgactgatgaatcctctcattgaccagtacctgtactacttatccagaactcagtccacaggaggaactcaaggtacccagcaattgttattttctcaagctgggcctgcaaacatgtcggctcaggccaagaactggctgcctggaccttgctaccggcagcagcgagtctccacgacactgtcgcaaaacaacaacagcaactttgcttggactggtgccaccaaatatcacctgaacggaagagactctctggtgaatcccggtgtcgccatggcaacccacaaggacgacgaggaacgcttcttcccgtcgagcggagtcctgatgtttggaaaacagggtgctggaagagacaatgtggactacagcagcgttatgctaacaagcgaagaagaaattaaaaccactaaccctgtagccacagaacaatacggcgtggtggctgacaacttgcagcaagccaatacagggcctattgtgggaaatgtcaacagccaaggagccttacctggcatggtctggcagaaccgagacgtgtacctgcagggtcccatctgggccaagattcctcacacggacggcaactttcacccgtctcctctgatgggcggctttggacttaaacacccgcctccacagatcctgatcaagaacacgccggtacctgcggatcctccaacaacgttcagccaggcgaaattggcttccttcatcacgcagtacagcaccggacaggtcagcgtggaaatcgagtgggagctgcagaaggagaacagcaaacgctggaacccagagattcagtacacttcaaactactacaaatctacaaatgtggactttgctgtcaatacagagggaacttattctgagcctcgccccattggtactcgttatctgacacgtaatctgtaa

SEQ ID NO: 191 - DNA, 2202 bp, Adeno-Associated Virus
  source 1..2202: mol_type = other DNA; note = AAV-13
atgactgacggttaccttccagattggctagaggacaacctctctgaaggcgttcgagagtggtgggcgctgcaacctggagcccctaaacccaaggcaaatcaacaacatcaggacaacgctcggggtcttgtgcttccgggttacaaatacctcggacccggcaacggacttgacaagggggaacccgtcaacgcagcggacgcggcagccctcgaacacgacaaggcctacgaccagcagctcaaggccggtgacaacccctacctcaagtacaaccacgccgacgccgagtttcaggagcgtcttcaagaagatacgtcttttgggggcaacctcggacgagcagtcttccaggccaaaaagaggatccttgagcctctgggtctggttgaggaagcggctaagacggctcctggaaaaaagagacctgtagagcaatctccagcagaaccggactcctcttcgggcatcggcaaatcaggccagcagcccgctagaaaaagactgaattttggtcagactggcgacacagagtcagtcccagaccctcaaccactcggacaacctcccgcagccccctctggtgtgggatctactacaatggcttcaggcggtggcgcaccaatggcagacaataacgagggtgccgatggagtgggtaattcctcaggaaattggcattgcgattcccaatggctgggcgacagagtcatcaccaccagcacccgcacctgggccctgcccacctacaacaatcacctctacaagcaaatctccagccaatcaggagccaccaacgacaaccactactttggctacagcaccccctgggggtattttgacttcaacagattccactgccacttttcaccacgtgactggcaaagactcatcaacaacaactggggattccgacccaagagactcaacttcaagctctttaacattcaagtcaaagaggtcacgcagaatgacggtacgacgacgattgccaataaccttaccagcacggttcaggtgtttactgactccgagtaccagctcccgtacgtcctcggctcggcgcatcagggatgcctcccgccgttcccagcagacgtcttcatggtcccacagtatggatacctcaccctgaacaacgggagtcaggcggtaggacgctcttccttttactgcctggagtactttccttctcagatgctgcgtactggaaacaactttcagtttagctacacttttgaagacgtgcctttccacagcagctacgctcacagccaaagtctggaccgtctcatgaatcctctgatcgaccagtacctgtactatctgaacaggacacaaacagccagtggaactcagcagtctcggctactgtttagccaagctggacccaccagtatgtctcttcaagctaaaaactggctgcctggaccttgctacagacagcagcgtctgtcaaagcaggcaaacgacaacaacaacagcaactttccctggactggtgccaccaaatatcatctgaatggccgggactcattggtgaacccgggccctgctatggccagtcacaaggatgacaaagaaaagtttttccccatgcatggaaccctgatatttggtaaagaaggaacaaatgccaacaacgcggatttggaaaatgtcatgattacagatgaagaagaaatccgcaccaccaatcccgtggctacggagcagtacgggactgtgtcaaataatttgcaaaactcaaacgctggtccaactactggaactgtcaatcaccaaggagcgttacctggtatggtgtggcaggatcgagacgtgtacctgcagggacccatttgggccaagattcctcacaccgatggacactttcatccttctccactgatgggaggttttgggctcaaacacccgcctcctcagatcatgatcaaaaacactcccgttccagccaatcctcccacaaactttagtgcggcaaagtttgcttccttcatcacacagtactccacggggcaggtcagcgtggagatcgagtgggagctgcagaaggagaacagcaaacgctggaatcccgaaattcagtacacttccaactacaacaaatctgttaatgtggactttactgtggacactaatggtgtgtattcagagcctcgccccattggcaccagatacctgactcgtaatctgtaa

SEQ ID NO: 192 - DNA, 2208 bp, Adeno-Associated Virus
  source 1..2208: mol_type = other DNA; note = BCD_0105
atggctgctgacggttatcttccagattggctcgaggacactctctctgaaggaatcagacagtggtggaagctcaaacctggcccaccaccgccgaaacctaaccaacaacaccgggacgacagtaggggtcttgtgcttcctgggtacaagtacctcggacccttcaacggactcgacaaaggagagccggtcaacgaggcagacgccgcggccctcgagcacgacaaagcctacgaccaccagctcaagcaaggggacaacccgtacctcaaatacaaccacgcggacgctgaatttcaggagcgtcttcaagaagatacgtctttcgggggcaacctcgggcgagcagtcttccaggccaaaaagagggtactcgagcctcttggtctggttgaggaagctgttaagacggctcctggaaaaaagagaccggtagagcactctcctgcggagccagactcctcctccggaactggaaagtcgggccaacagcctgcaagaaagagattgaattttggtcagactggcgacacagagtcagtcccggaccctcaaccaatcggagaaccccccgcagccccctctggtgtgggatctaatacaatggcttcaggcggtggggcaccaatggcagacaataacgaaggcgccgacggagtgggtaattcctcgggaaattggcattgcgattccacatggatgggcgacagagttatcaccaccagcacaagaacctgggccctccccacctacaataatcacctctacaagcaaatctccagcgaatcgggagccaccaacgacaaccactacttcggctacagcaccccctgggggtattttgactttaacagattccactgtcacttctcaccacgtgactggcagcgactcatcaacaacaactggggattcagacccaagaaactcaatttcaagctcttcaacatccaagtcaaggaggtcacgcagaatgatggaaccacgaccatcgccaataaccttaccagcacggtgcaggtcttcacagactctgagtaccagctgccctacgtcctcggctcggcgcatcaaggatgcctcccgccgttcccagcagacgtcttcatggtgccacagtatggatacctcaccctgaacaacgggagtcaggcggtaggacgttcttcattctactgtctagagtattttccctctcagatgctgaggacgggaaacaacttcaccttcagctacacttttgaagacgttcctttccacagcagctacgcgcacagccagagtctggatcggctgatgaatcctctcattgaccagtacctgtattacctgagcaaaacaaacactccaagcggaaccaccacgcagtccaggcttcagttttctcaggccggagcaagtgacattcgggaccagtctaggaactggcttcctggaccctgttaccgccagcagcgagtatcaaagacagctgcggacaacaacaacagtgaatactcgtggactggagctaccaagtaccacctcaatggcagagactctctggtaaatccgggcccggccatggccagccacaaggacgacgaagaaaagttttttcctcagagcggggttctcatatttggaaaacaaggctcagagaaaacaaatgtggacattgaaaaggtcatgattacagacgaagaggaaatcaggaccaccaatcccgtggctacggagcaatatggtgctgtatctaccaacctccagagcggcaacacacaagcagctacctcagatgtcaacacacaaggcgttcttccaggcatggtctggcaggacagagacgtgtacctgcaggggcctatctgggcaaagattccacacacggacggacattttcacccctctcccctcatgggcggattcggacttaaacaccctcctccacagattctcatcaagaacaccccggtacctgcgaatccttcgaccactttcagtgcggcaaagtttgcttctttcattacacagtattctaccggacaggtcagcgtggaaatagagtgggagctgcagaaagaaaacagcaaacgctggaaccctgaaatccagtacacttccaactacaacaagtcggtgaatgtggagtttactgtggacactaatggtgtgtattcagagcctcgccccattggcaccagatacctgactcgtaatctgtaa

SEQ ID NO: 193 - DNA, 2181 bp, Adeno-Associated Virus
  source 1..2181: mol_type = other DNA; note = BCD_0106
atgtcgtttgttgatcaccctccagattggttggaagaggttggtgaaggccttcacgagtttttggagctcgaagctggcccacccaaaccgaagcccaaccagcagaagcaggacaacgcccgtggtcttgtactgcctggatataattatctgggacccttcaacggactcgacaagggagagcccgtcaaccgagcggacgccgtcgcgcgagagcacgacatctcgtacaacgagcagctccaggcgggagacaacccctacctcaagtacaaccacgcggacgctgagtttcaggagaagctcaaggacgacacctcctttgggggcaacctcggaaaggcaatctttcaggccaagaaaagggttctcgaaccttttggcctggttgaagctcctgttaagacggctccagccaagaagcggccgatagagaagtctcctgcggaaccgagctcctcgaagggcatcggcaaggcgggtcagcagcccgcaagaaagcgactcaactttggtcagactggagacgccgactcagcagccgacccccagcctctcggagaaccaccagcagccccctctggtctgggaactggtacgatggcttcaggcagtggcgcaccaatggcagacaataacgaaggcgccgacggagtgggtaatgcctcgggaaattggcattgcgattccacatggctgggcgaccgagtcatcaccaccagcacccgcacctgggccctgcccacctacaacaaccacctctacaagcaaatctccagccaatccggggccagcaacgacaaccattactttggttacagcaccccttgggggtactttgacttcaaccgcttccactgccatttctcgcctcgagactggcagcgactcatcaacaacaactggggattccgtcccaagcggctcaacttcaagctgttcaacatccaagtcaaggaggtcacggagaatgaaggtacaaagacgatcgccaataaccttaccagcacggttcaggtgtttgccgattcggagtaccagctcccgtacgtcctcggctcggcgcaccagggctgcttcccgccgttcccagcggatgtcttcatgatcccacaatacgggtacctgaccctgaacaatgggagtcatgccatgggccgctcgtccttctactgtctggagtactttccgtcgcagatgctgaggacgggaaacaacttcacattcagctacaccttcgaggacgtgcccttccacagcagctacgcgcacagccagagcctggaccggctcatgaacccgctcatcgaccagtacctgtactacctgagcaagacacagaacggcttgggcttttctcaagcgggacccaacagcatgagagaccagtccaggaattggcttccgggtccctgcttccgtcaacagcggatttcgaccgtacctacacaaaataacaatgcagagttttcgtggacgggagccaccaagtatcacctcaacggaagaaactctgcgatgaacccgggcccggccatggccactcataaggacgacgaggaacgtttcttcccccaaaacggtgtgctcatctttggaaaacagggcgcagacaagacaaatgcggtgctcgaaaaagtgatcgttaccgacgaagaggagataagggccacgaacccagtggccacggaggagtacggagtcgtcgctacaaatctccagaacggcaatacgcaggcgacgaccaacgacgtcaacgcacaaggcattcttcccggcatggtgtggcaagaccgggacgtgtatctgcaagggcccatctgggccaagatcccctacacggacggacactttcatccctcaccgctcatgggcggattcgggctcaagcgccctccaccgcagattcttatcaaaaacacacctgtacccggagatccgcctacgaccttcagtcagaataagctcgcctccttcatcacgcagtactccactggccaggtaagcgtggagatcgagtgggagctgcagaaggagaacagcaagcgctggaaccccgaggtccagtacacgtccaactacaacaagtccgtcaacgtagacttcaccgtgaacggggatggcgtgtactcggaaccccgcaccatcggcacccgctacctcacccgcaatctgtaa

SEQ ID NO: 194 - DNA, 2211 bp, Adeno-Associated Virus
  source 1..2211: mol_type = other DNA; note = BCD_0112
atggctgccgatggttatcttccagattggctcgaggacaacctcagtgaaggcattcgcgagtggtgggctttgaaacctggagcccctcaacccaaggcaaatcaacaacatcaagacaacgctcggggtcttgtgcttccgggttacaaataccttggacccggcaacggactcgacaagggggagccggtcaacgcagcagacgccgcggccctcgagcacgacaaggcctacgaccagcaactcaaggccggagacaacccgtacctcaagtataaccacgccgacgccgaattccaggagcggctcaaagaagatacgtcttttgggggcaacctcgggcgagcagtcttccaggccaaaaagaggcttcttgaacctcttggtctggttgaggaagcggctaagacggctcctggaaagaagaggcctatagagcagtctcctcaggaaccggactcctccgtgggtattggcaaatcgggtgcacagcccgctaaaaagagactcaatttcggtcagactggcgacacagagtcagtccccgaccctcaaccaatcggagaacctcccgcagccccctcaggtgtgggatctcttacaatggcttcaggtggtggcgcaccagtggcagacaataacgaaggtgccgatggagtgggtagttcctcgggaaattggcattgcgattcccaatggctgggggacagagtcatcaccaccagcacccgaacctgggccctgcccacctacaacaaccacctctacaagcaaatctctaacagcacatctggaggatcttcaaatgacaacgcctacttcggctacagcaccccctgggggtattttgacttcaacagattccactgccacttctcaccacgtgactggcagcgactcatcaacaacaactggggattccggcctaagcgactcaacttcaagctcttcaacattcaggtcaaagaggttacggacaacaatggagtcaagaccatcgccaataaccttaccagcacggtccaggtcttcacggactcagactatcagctcccgtacgtgctcgggtcggctcacgagggctgcctcccgccgttcccagcggacgttttcatgattcctcagtacgggtatctgacgcttaatgatggaagccaggccgtgggtcgttcgtccttttactgcctggaatatttcccgtcgcaaatgcttcgtaccggaaacaactttaccttcagctacgagtttgagaacgtacctttccatagcagctacgctcacagccaaagcctggaccgactcatgaatccactcatcgaccaatacttgtactatctctcaaagactattaacggttctggacagaatcaacaaacgctaaaattcagtgtggccggacccagcaacatggcagtccagggaagaaactacatacctggacccagctaccgacaacaacgtgtctcaaccactgtgactcaaaacaacaacagcgaatttgcttggcctggagcttcttcttgggctctcaatggacgtaatagcttgatgaatcctggacctgctatggccagccacaaagaaggagaggaccgtttctttcctttgtctggatctttaatttttggcaaacaaggaactggaagagacaacgtggatgcggacaaagtcatgataaccaacgaagaagaaattaaaactaccaacccggtagcaacggagtcctatggacaagtggccacaaaccaccagagtgcccaagcacaggcgcagaccggctgggttcaaaaccaaggaatacttccgggtatggtttggcaggacagagatgtgtacctgcaaggacccatttgggccaaaattcctcacacggacggcaactttcacccttctccgctaatgggagggtttggaatgaagcacccgcctcctcagatcctcatcaaaaacacacctgtacctgcggatcctccaacggctttcaacaaggacaagctgaactctttcatcacccagtattctactggccaagtcagcgtggagattgagtgggagctgcagaaggaaaacagcaagcgctggaacccggagatccagtacacttccaactattacaagtctaataatgttgaatttgctgttaatactgaaggtgtatatagtgaaccccgccctattggtactcgttatcttacccggaacctgtaa

SEQ ID NO: 195 - DNA, 2208 bp, Adeno-Associated Virus
  source 1..2208: mol_type = other DNA; note = BCD_0113
atggctgccgatggttatcttccagattggctcgaggacactctctctgaaggaataagacagtggtggaagctcaaacctggcccaccaccgccaaagcccgcagagcggcataaggacgacagcaggggtcttgtgcttcctgggtacaagtaccttggacccttcaacggactcgacaagggagagccggtcaacgaggcagacgccgcggccctcgagcacgacaaggcctacgaccggcagctcgacagcggagacaacccgtacctcaagtacaaccacgccgacgcggagttccaggagcgtcttaaagaagatacgtcttttgggggcaacctcggacgagcagtcttccaggcgaaaaagagggttcttgaacctctgggcctggttgaggaacctgttaagacggctccgggaaaaaagaggccggtagagcactctcctgcggagccagactcctcctcgggaatcggaaaagcgggccagcagcctgcaagaaaaagattgaatttcggtcagactggagacgcagactccgtacctgacccccagcctctcggacagccaccagcagccccctctggtttgggatctactacaatggctacaggcagtggcgcaccagtggcagacaataacgagggtgccgatggagtgggtaattcctcaggaaattggcattgcgattcccaatggctgggcgacagagtcatcaccaccagcacccgaacctgggccctgcccacctacaacaaccacctctacaagcaaatctccagccaatcaggagccagcaacgacaaccactactttggctacagcaccccctgggggtattttgacttcaacagattccactgccacttttcgccacgtgactggcagagactcatcaacaacaactggggattccgacccaagagactcaacttcaagctctttaacattcaagtcaaagaggtcacgcagaatgacggtacgacgacgattgccaataaccttaccagcacggttcaggtgtttactgactcggagtaccagctcccgtacgtcctcggctcggcgcatcagggatgcctcccgccgttcccagcagacgtctttatggtcccacagtatggatacctcaccctgaacaacgggagtcaggcggtaggacgctcttcattttactgcctggagtactttccttctcagatgctgcgtactggaaacaactttcagttcagctacacttttgaagacgtgcctttccacagcagctacgctcacagccagagtctggatcggctgatgaatcctctgatcgaccagtacctgtattatctgaacaagacacaatcaaatagtggaactcttcagcagtctcggctactgtttagccaagctggacccaccagcatgtctcttcaagctaaaaactggctgcctggaccttgctacagacagcagcgtctgtcaaagcaggcaaacgacaacaacaacagcaactttccctggactgcagctacaaagtatcatctaaatggccgggactcgttggttaatccaggaccagctatggccagccacaaagacgatgaagaaaagtttttccccatgcatggaaccctgatatttggtaaacaaggaacaaatgctaacgacgcggatttggacaatgtcatgattacagacgaagaagaaatccgcaccaccaatcccgtggctacggagcagtacggatatgtgtcaaataatttgcaaaactcaaatactggtccaactactggaactgtcaatcaccaaggagcgttacctggtatggtgtggcaggatcgagacgtgtacctgcagggacccatttgggccaagattcctcacaccgatggacactttcatccttctccactgatgggaggttttgggctcaaacacccgcctcctcagatcatgatcaaaaacactcccgttccagccaatcctcctacaaacttcagttctgccaagtttgcttctttcatcacacagtattccacggggcaggtcagcgtggagatcgagtgggagctgcagaaggagaacagcaaacgctggaatcccgagattcagtacacttccaactacaacaaatctgttaatgtggactttactgtggacactaatggtgtgtattcagagcctcgccccattggcaccagatacctgactcgtaatctgtaa

SEQ ID NO: 196 - DNA, 2208 bp, Adeno-Associated Virus
  source 1..2208: mol_type = other DNA; note = BCD_0114
atggctgccgatggttatcttccagattggctcgaggacactctctctgaaggaataagacagtggtggaagctcaaacctggcccaccaccaccaaagcccgcagagcggcataaggacgacagcaggggtcttgtgcttcctgggtacaagtacctcggacccttcaacggactcgacaaaggagagccggtcaacgaggcagacgccgcggccctcgagcacgacaaggcctacgaccggcagctcgacagcggagacaacccgtacctcaagtacaaccacgccgacgcggagtttcaggagcgccttaaagaagatacgtcttttgggggcaacctcggacgagcagtcttccaggccaaaaagagggttcttgaacctctgggcctggttgaggagcctgttaagacggctccgggaaaaaagaggccggtagagcactctcctgcggagccagactcctcctcgggaaccggaaaagcgggccagcagcctgcaagaaaaagattgaattttggtcagactggagacgcagactccgtacctgacccccagcctctcggacaaccaccagcagccccctctggtctgggatctactacaatggctacaggcagtggcgcaccagtggcagacaataacgagggtgccgatggagtgggtaattcctcaggaaattggcattgcgattcccaatggctgggcgacagagtcatcaccaccagcacccgaacctgggccctgcccacatacaacaaccacctctacaagcaaatctccagccaatcaggagccagcaacgacaaccactactttggctacagcaccccctgggggtattttgacttcaacagattccactgccacttttcaccacgtgactggcaaagactcatcaacaacaactggggattccggcccaagagactcaacttcaagctctttaacattcaagtcaaagaggtcacgcagaatgacggtacgacgacgattgccaataaccttaccagcacggttcaggtgtttactgactcggagtaccagctcccgtacgtcctcggctcggcgcatcaaggatgcctcccgccgttcccagcagacgtcttcatggtgccacagtatggatacctcaccctgaacaacgggagtcaggcagtaggacgctcttcattttactgcctggagtactttccttctcagatgctgcgtactggaaacaactttcagttcagctacacttttgaagacgtgcctttccacagcagctacgctcacagccagagtctggatcggctgatgaatcctctgatcgaccagtacctgtattatctgaacaagacacaatcaaatagtggaactcttcagcagtctcggctactgtttagtcaagctggacccaccagcatgtctcttcaagctaaaaactggctgcctggaccttgctacagacagcagcgtctgtcaaagcaggcaaacgacaacaacaacagcaactttccctggactgcagctacaaagtatcatctaaatggccgggactcgttggttaatccaggaccagctatggccagccacaaagacgatgaagaaaagtttttccccatgcatggaaccctgatatttggtaaacaaggaacaaatgctaacgacgcggatttggacaatgtcatgattacagacgaagaagaaatccgcaccaccaatcccgtggctacggagcagtacggatatgtgtcaaataatttgcaaaactcaaatactggtccaactactggaactgtcaatcaccaaggagcgttacctggtatggtgtggcaggatcgagacgtgtacctgcagggacccatctgggccaagattcctcacaccgatggacactttcatccttctccactgatgggaggttttgggctcaaacacccgcctcctcagatcatgatcaaaaacactcccgttccagccaatcctcctacaaacttcagttctgccaagtttgcttctttcatcacacagtattccacggggcaggtcagcgtggagatcgagtgggagctacagaaggagaacagcaaacgctggaatcccgagattcagtacacttccaactacaacaaatctgttaatgtggactttactgtggacactaatggtgtgtattcagagcctcgccccattggcaccagatacctgactcgtaatctgtaa

SEQ ID NO: 197 - DNA, 2208 bp, Adeno-Associated Virus
  source 1..2208: mol_type = other DNA; note = BCD_0115
atggctgccgatggttatcttccagattggctcgaggacactctctctgaaggaataagacagtggtggaagctcaaacctggcccaccaccaccaaagcccgcagagcggcacaaggacgacagcaggggtcttgtgcttcctgggtacaagtacctcggacccttcaacggactcgacaaaggagagccggtcaacgaggcagacgccgcggccctcgagcacgacaaggcctacgaccggcagctcgacagcggagacaacccgtacctcaagtacaaccacgccgacgcggagtttcaggagcgtcttaaagaagatacgtcttttgggggcaacctcggacgagcagtcttccaggcgaaaaagagggttcttgaacctctgggcctggttgaggaacctgttaagacggctccgggaaaaaagaggccggtagagcactctcctgcggagccagactcctcctcgggaaccggaaaagcgggccagcagcctgcaagaaaaagattgaatttcggtcagactggagacgcagactccgtacctgacccccagcctctcggacagccaccagcagccccctctggtctgggatctactacaatggctacaggcagtggcgcaccaatggcagacaataacgagggtgccgatggagtgggtaattcctcaggaaattggcattgcgattcccaatggttgggcgacagagtcatcaccaccagcacccgaacctgggccctgcccacctacaacaaccacctctacaagcaaatctccagccaatcaggagccagcaacgacaatcactactttggctacagcaccccctgggggtattttgacttcaacagattccactgtcacttctccccacgtgactggcaaagactcatcaacaacaactggggattccgacccaagagactcaacttcaagctctttaacattcaagtcaaagaggtcacgcagaatgacggtacgacgacgattgccaataaccttaccagcacggttcaggtctttactgactcggagtaccagctcccgtacgtcctcggctcggcgcatcaaggatgcctcccgccgtttccagcggacgtcttcatggtcccacagtatggatacctcaccctgaacaacgggagtcaggcggtaggacgctcttccttttactgcctggagtactttccttctcagatgctgcgtactggaaacaactttaccttcagctacacctttgaggacgttcctttccacagcagctacgctcacagtcaaagtctggaccggctgatgaatcctcttatcgaccagtacctgtattatctaaacaagacacaatcaaatagtggaactcttcagcagtctcggctactgtttagccaagctggacccaacagcatgtctcttcaagctaaaaactggctacctggaccttgctacagacagcagcgtctgtcaaagcaggcaaacgacaacaacaacagcaactttccctggactgcggctacaaagtatcatctaaatggccgggactcgttggttaatccaggaccagctatggccagccacaaagacgatgaagaaaagtttttccccatgcatggaaccctgatatttggtaaacaaggagcaaatgctaacgacgcggatttggacaatgtcatgattacagatgaagaagaaatccgcaccaccaatcccgtggctacggagcagtacggatatgtgtcaaataatttgcaaaactcaaatactggtccaactactggaactgtcaatcaccaaggagcgttacctggtatggtgtggcaggatcgagacgtgtacctgcagggacccatttgggccaagattcctcacaccgacggacactttcacccttctccactgatgggaggttttggactcaaacacccgcctcctcaaatcatgatcaaaaacactcccgttccagccaatcctcctacaaacttcagcgcggcaaagtttgcttctttcatcacacagtactccacggggcaggtcagcgtggagatcgagtgggagctgcagaaagagaacagcaaacgctggaaccccgagatccagtacacttccaactacaacaaatctgttaatgtggactttactgtagacactaatggtgtgtattcagagcctcgccccattggcaccagatacctgactcgtaatctgtaa

SEQ ID NO: 198 - DNA, 2208 bp, Adeno-Associated Virus; identical to SEQ ID NO: 195
  source 1..2208: mol_type = other DNA; note = BCD_0117

SEQ ID NO: 199 - DNA, 2187 bp, Adeno-Associated Virus
  source 1..2187: mol_type = other DNA; note = BCD_0120
atggctgctgacggttatcttccagattggctcgaggacaacctctctgagggcattcgcgagtggtggaacctgaaacctggagccccgaaacccaaggctaaccagcaaaaacaggaccacggccggggtttggtgcttcctggctacaagtacctcggacccttcaacggactcgacaagggggagcccgtcaacgaggcagacgccgcggccctcgagcacgacaaggcctacgaccagcagctcaaagcgggtgacaatccgtacctgcggtataaccacgccgacgccgagtttcaggagcgtctgcaagaagatacgtcttttgggggcaacctcgggcgagcagtcttccaggccaagaagcgggttctcgaacctctcggtctggttgaggaaggcgctaagacggctcctggaaagaagagacccatagaatcccccgactcctccacgggcatcggcaagaaaggccagcagcccgctaaaaagaagctcaactttgggcagactggcgactcagagtcagtgcccgacccacaacctctcggagaacctccagcagccccctcaggtctgggatctggtacaatggctgcaggcggtggcgcaccaatggcagacaataacgaaggcgccgacggagtgggtaatgcctcaggaaattggcattgcgattccacatggctgggcgacagagtcatcaccaccagcacccgcacctgggccctgcccacctacaacaaccacctctacaagcaaatatcaagtcagagcggggccaccaacgacaaccacttcttcggctacagcaccccctgggggtattttgacttcaacagattccactgccacttctcaccacgtgactggcagcgactcatcaacaacaactggggattccggcccagaaagctgcggttcaagttgttcaacatccaggtcaaggaggtcacgacgaacgacggcgttacgaccatcgctaataaccttaccagcacgattcaggtcttctcggactcggagtaccaactgccgtacgtcctcggctctgcgcaccagggctgcctccctccgttcccggcggacgtgttcatgattcctcaatacggatatctgactctgaacaacggcagtcagtctgtgggacgttcctccttctactgcctggagtactttccttctcagatgctgagaacgggcaacaactttgaattcagctacaccttcgaggaagtgcctttccacagcagctacgcgcacagccaaagcctggaccggctcatgaatcccctcatcgaccagtacctgtactacctggcccggacccagagcactacggggtccacaaaggagctgcagttccatcaggctgggcccaacaccatggccgagcaatcaaagaactggctgcccggaccctgttatcggcagcagagactgtcaaaaaacagagacagcaacaacaatagtaactttgcctggactggggccactacatatcatctgaatggcagaaattcattaaccaacccgggcgtagccatggccaccaacaaagacgacgaggaccatttctttcccatcaacggagtgctggtttttgggaaaacgggagccgccaacaagacaacgctggaaaacgtgctaatgaccagcgaggaggagattaagaccaccaatcccgtggctaccgaagaatacggcgtggtctccagcaacctgcaatcatctacggccggacctcagacacagaccgtcaacagccagggggctctgcccggcatggtgtggcaaaaccgggacgtgtacctgcagggtcccatctgggccaaaattcctcacacggacggcaactttcacccgtctccactcatgggcggctttggactcaagcacccgcctcctcaaatcttaattaaaaacaccccggtacctgcgaatcctccagaggtgtttacccctgccaagtttgcttcgttcatcacgcagtacagcaccggccaggtcagcgtggagatcgaatgggaactgcagaaagaaaacagcaaacgctggaatccagagatccagtacacctccaattatgccaagtcgaataatgtggaatttgctgtcaacaaccaaggggtttatactgagcctcgccccattggcacccgttacctcacccgtaatctgtaa

SEQ ID NO: 200 - DNA, 2211 bp, Adeno-Associated Virus
  source 1..2211: mol_type = other DNA; note = BCD_0125
atggctgctgacggttatcttccagattggctcgaggacaacctctctgagggcattcgcgagtggtggaacctgaaacctggagccccgaaacccaaggctaaccagcaaaaacaggaccacggccggggtttggtgcttcctggctacaagtacctcggacccttcaacggactcgacaagggggagcccgtcaacgaggcagacgccgcggccctcgagcacgacaaggcctacgaccagcagctcaaagcgggtgacaatccgtacctgcggtataaccacgccgacgccgagtttcaggagcgtctgcaagaagatacgtcttttgggggcaacctcgggcgagcagtcttccaggccaaaaagagggtactcgagcctctcggtctggttgaggaaggcgctaagacggctcctggaaaaaagagaccggtagagcagtcaccccaagaaccggactcctcctcgggcatcggcaagacaggccagcagcccgctaaaaagagactcaattttggtcagactggcgactcagagtcagttcccgaccctcaaccaatcggagaacctccagcagccccctcaggtctgggatctaatacaatggcttcaggcggtggcgctccaatggcagacaataacgaaggcgccgacggagtgggtaattcctcgggaaattggcattgcgattccacatggctgggggacagagtcatcaccaccagcaccagaacctgggccctccccacctacaacaaccacctctacaagcaaatctccaacggaacctcgggaggcagcaccaacgacaacacctacttcggctacagcaccccctgggggtatttcgactttaacagattccactgccacttctcaccacgtgactggcagcgactcatcaacaacaactggggattccggcccaagaagctcaacttcaagctgttcaacatccaggtcaaggaggtcacgacgaacgaaggcaccaagaccatcgccaataacctcaccagcaccgtgcaggtctttacggactcggagtatcagctaccgtacgtgctaggctctgcacaccagggatgcttgcctccgttcccggcggatgtcttcatgattccccagtacggttacctgacgctaaacaatggaagtcaggcgctggggcgatcctccttctactgcctggaatactttccatctcagatgctcaggactggcaacaactttcagtttagctacacatttgaagacgtgcctttccacagcagctacgcgcacagccagagcttggaccggctgatgaaccctctgattgaccagtatctgtactacctggtcagaactcagaccactggcacgggtggaactcagactctggcattcagccaaggagggcccagcactatggccaatcaggctagaaactgggtacccgggccctgctatcggcagcagcgcgtttctacaactaccaatcaaaacaacaacagcaactttgcttggaccggagcagccaaattcaagctgaatggccgggactctctgatgaatcctggtgtggccatggcttcccacaaagacgacgaggaccgcttcttcccatccagcggagtgctgattttcgggaagcagggagccaacaaagacggagcagactacagccaggtgctgattacagatgaagaagagattaaagctacaaaccccgtggctacagaggaatatggatcagtggccatcaacaaccagaatgcaagtacgcaggcgcagactggacttgttcacaaccagggagtcattcccggtatggtctggcaaaacagagacgtgtacctgcagggtccaatctgggccaagattccacatacagacggcaattttcacccgtctcctctgatgggcggctttggacttaagcacccgcctccacagatcctgatcaaaaacactccggttcctgccgaccccccgcttacctttaatgaagccaagctgaactctttcatcacccagtacagcaccggccaggtcagcgtggagattgagtgggagctgcagaaggagaacagcaagaggtggaatccagagattcagtacacttccaactactacaaatctacaaatgtggactttgctgtcaatacagaaggtgtatatagcgaaccccgccccattggcactcgttacctcacccgcaacctgtaa

SEQ ID NO: 201 - DNA, 2217 bp, Adeno-Associated Virus
  source 1..2217: mol_type = other DNA; note = BCD_0126
atggctgctgacggttatcttccagattggctcgaggacaacctctctgagggcattcgcgagtggtggaacctgaaacctggagccccgaaacccaaggctaaccagcaaaaacaggaccacggccggggtttggtgcttcctggctacaagtacctcggacccttcaacggactcgacaagggggagcccgtcaacgaggcagacgccgcggccctcgagcacgacaaggcctacgaccagcagctcaaagcgggtgacaatccgtacctgcggtataatcacgccgacgccgagtttcaggagcgtctgcaagaagatacgtcttttgggggcaacctcgggcgcgcagtctttcaggccaaaaagcgggttctcgaacctctgggcctggttgaatcgccggttaaaacggcacctggaaagaagagaccggtagagccctcaccgcagcgttctcccgactcctccacgggcatcggcaagaaaggccagcagcccgcgaaaaagagactcaattttgggcagactggcgactcagagtcagtgcccgaccctcaaccaatcggagaaccaccagcaggcccctctggtctgggatctggtacaatggctgcaggcggtggcgctccaatggcagacaataacgaaggcgccgacggagtgggtagttcctcaggaaattggcattgcgattccacatggctgggcgacagagtcatcaccaccagcacccgaacctgggccctccccacctacaacaaccacctctacaagcaaatctccaacgggacatcgggaggaagcaccaacgacaacacctacttcggctacagcaccccctgggggtattttgactttaacagattccactgccacttctcaccacgtgactggcagcgactcatcaacaacaactggggattccggcccaagagactcaacttcaagctcttcaacatccaggtcaaggaggtcacgcagaatgaaggcaccaagaccatcgccaataaccttaccagcacgattcaggtctttacggactcggaataccagctcccgtacgtcctcggctctgcgcaccagggctgcctgcctccgttcccggcggacgtcttcatgattccccagtacgggtacctgactctgaacaatggcagtcaggccgtgggccgttcctccttctactgcctggagtactttccttctcaaatgctgagaacgggcaacaactttgagttcagctaccagtttgaggacgtgccttttcacagcagctacgcgcacagccaaagcctggaccggctgatgaaccccctcatcgaccagtacctgtactacctgtctcggactcagtccacgggaggtaccgcaggaactcagcagttgctattttctcaggccgggcctaataacatgtcggctcaggccaaaaactggttgcctgggcccatgtaccggcagcaacgcgtctccacgacactgtcgcaaaataacaacagcaactttgcctggaccggtgctaccaagtatcatctgaatggcagagactctctggtaaatcccggtgtcgctatggcaacccacaaggacgacgaggagcgattttttccatccagcggagtcttgatgtttgggaaacagggagctggaaaagacaacgtggactatagcagagtaatgctaaccagtgaggaagaaattaagaccaccaaccctgtagccacagaacagtacggcgtggtggccgataacctgcaacagcaaaacgtcgctcctattgtaggggccgtcaacagtcaaggagccttacctggcatggtatggcagaaccgggacgtgtacctgcagggtccaatctgggccaagattcctcatacggacggcaactttcatccctcgccgctgatgggaggctttggactgaaacatccgcctcctcagatcctgattaaaaacacacctgttcccgcggatcctccaactaccttcagtcaagctaagctggcgtcgttcatcacgcagtacagcaccggccaggtcagcgtggaaattgaatgggagctacagaaggagaacagcaagcgctggaacccagaaattcagtacacctccaactactacaaatctacaaatgtggactttgctgtcaatactgatggtaattattctgagcctcgccccattggcactcgttacctcacccgtaatctgtaa

SEQ ID NO: 202 - DNA, 2211 bp, Adeno-Associated Virus
  source 1..2211: mol_type = other DNA; note = BCD_0127
atggctgccgatggttatcttccagattggctcgaggacaacctctctgagggaattcgcgagtggtggaacctgaaacctggagccccgaaacccaaagccaaccagcaaaagcaggacaacggccggggtctggtgcttcctggctacaagtacctcggacccttcaacggactcgacaagggggagcccgttaacgcggcggacgcagcggccctcgagcacgacaaggcctacgaccagcagctccaagcgggtgacaatccgtacctgcggtataatcacgccgacgccgagtttcaggagcgtctgcaagaagatacgtcttttgggggcaacctcgggcgcgcagtctttcaggccaaaaagcgggttctcgaacctctgggcctagttgaatcgccggttaaaacggcacctggaaagaagagaccggtagagccctcaccgcagcgttctcccgactcctccacgggcatcggcaagaaaggccagcagcccgcgaaaaagagactcaattttgggcagactggcgactcagagtcagtgcccgaccctcaaccaatcggagaaccaccagcaggcccctctggtctgggatctggtacaatggctgcaggcggtggcgctccaatggcagacaataacgaaggcgccgacggagtgggtagttcctcaggaaattggcattgcgattccacatggctgggcgacagagtcatcaccaccagcacccgcacctgggccctgcccacctacaacaaccacctctacaagcaaatatcaagtcagagcggggccaccaacgacaaccacttcttcggctacagcaccccctgggggtattttgacttcaacagattccactgccacttctcaccacgtgactggcagcgactcatcaacaacaactggggattccggcccagaaagctgcggttcaagttgttcaacatccaggtcaaggaggtcacgcagaatgaaggcaccaagaccatcgccaataaccttaccagcacgattcaggtctttacggactcggaataccagctcccgtacgtcctcggctctgcgcaccagggctgcctgcctccgttcccggcggacgtcttcatgattccccagtacgggtacctgactctgaacaatggcagtcaggccgtgggccgttcctccttctactgcctggagtactttccttctcaaatgctgagaacgggcaacaactttgagttcagctaccagtttgaggacgtgccttttcacagcagctacgcgcacagccaaagcctggaccggctgatgaaccctctcatcgaccagtacctgtactatctgtctcggactcagtccacgggaggtaccacaggaactcagaagttgctattttctcaggccgggcctaataacatgtcggctcaggccaaaaactggctacccgggccctgctaccggcagcaacgcgtctccacaacaaccaaccagaataacaacagcaactttgcctggacgggtgccaccaagtatcatctgaatggcagagactctctggtaaatcctggcgttgccatggctacccacaaggacgacgaggagcgattttttccatccagcggagtcttgatgtttgggaaacagggagctggaaaagacaacgtggactatagcagcgtaatgctaaccagtgaggaagaaattaagaccaccaaccctgtagccacagaagagtacggcgtggtggccgataacctgcaacagcaaaacgtcgctcctattgtaggggccgtcaacagtcaaggagccttacctggcatggtatggcagaaccgggacgtgtacctgcagggtccaatctgggccaagattcctcatacggacggcaactttcatccctcgccgctgatgggaggctttggactgaaacatccgcctcctcagatcctgattaaaaacacacctgttcccgcggatcctccgaccaccttcaatcaggccaagctggcgtcgttcatcacgcagtacagcaccggccaggtcagcgtggagatcgagtgggagctacagaaggagaacagcaagcgctggaacccagaaattcagtacacctccaactactacaaatctacaaatgtggactttgctgtcaatactgagggtacttattctgagcctcgccccattggcactcgttacctcacccgtaatctgtaa

SEQ ID NO: 203 - DNA, 2226 bp, Adeno-Associated Virus
  source 1..2226: mol_type = other DNA; note = BCD_0135
atggctgctgacggttatcttccagattggctcgaggacaacctctctgaaggcattcgcgagtggtgggcgctgaaacctggagccccacaacccaaggccaaccaacagcatcaggacaacggcaggggtcttgtgcttcctgggtacaagtacctcggacccttcaacggactcgacaagggagagccggtcaacgaggcagacgccgcggccctcgagcacgacaaggcctacgacaagcagctcgagcagggggacaacccgtacctcaagtacaaccacgcggacgccgagtttcaggagcgtcttcaagaagatacgtcttttgggggcaacctcgggcgagcagtcttccaggccaaaaagaggattctcgagcctctgggtctggttgaggaagcggctaagacggctcctggaaagaagcgacctctagagaaaactcccaatcagcccacggacactcaggccgccgggcagactccagccaagaaaaggccacagggcgagcaatctggcaacccagctagacgccgcctcgactttaaccaacaaccagcagaaccaatcggagaaccccccgcagccccctctggtgtgggatctactacaatggctacaggcggtggcgctccagtggcaagtgataacgagggcgccgacggagtgggtaattcctcaggaaattggcattgcgattccacatggctgggcgacagagtcatcaccaccagcacccgaacctgggccctccccacctacaacaaccacctctacaagcaaatctccagcggcacctcgggaggagcatcaaacaacaacgcctacttcggctacagcaccccctgggggtattttgacttcaacagattccactgccacttctcaccacgtgactggcagcgactcatcaacaacaactggggattccggcccaagagactcagcttcaagctcttcaacatccaggtcaaggaggtcacgcaaaatgacggcactacgaccatcgccaataacctcaccagcacggtgcaggtctttacggactcggagtaccagctgccctacgtcctcgggtcggcccaccagggctgcctcccgccgttcccggccgatgtcttcatgattccccagtatggatacctgaccctaaacgatggcagtcaagcagtgggacgctcttccttctactgcctggaatattttccatcgcagatgctgagaaccggtaacaacttctccttcagctacgtgtttgaagatgtgcccttccacagcagctacgcgcacagccagagcctggaccgactgatgaaccctctcatcgatcagtacctgtattatctgaacagaacacagggcaccacctctggaacaaccaaccaatcacggctgctgtttagccaggccggacctcaatccatgtctctgcaggccaaaaactggctacccgggccctgttaccgacaacagagactttcaaagactgctaatgccaaccacaacagtaatttcacctggacgggggcaactacttaccatctaaatggccgggactccctggtcaatccagggcctgctatggcctcgcacaaggacggagaagagcagttcttccctatgactggaaacctggtatttggaaaacaaggcatgggttcatcaaacgtggacatcgagaacgtcatgatcacagatgaagaagaaatcagaaccaccaatccagtggctacagagcagtacggaaatgtagcagacaaccttcagagctcaaacacagcgccaatcgtgggaaatgtcaacagccaaggagcactacccggtatggtctggcaggaccgggacgtgtacctgcagggccccatttgggccaagattcctcacacggacggacactttcacccgtctcccctgatgggcggctttggattgaagcacccgcctccccagattctcatcaagaatacgcccgtacctgcgaatcctccaacgtccttcaatccagcaaagttttcttcttttatcactcaatattctactggacaagtcagcgtggaaatagaatgggagctgcagaaggaaaacagcaagcgctggaacccggagattcagtacacctccaactacaacaagtctgttaatgtggactttactgtggacaccaatggtgtttattctgaaccccgccctattggcactcgttacctcacccgtaatctgtaa

SEQ ID NO: 204 - DNA, 2208 bp, Adeno-Associated Virus
  source 1..2208: mol_type = other DNA; note = BCD_0137
atggctgccgatggttatcttccagattggctcgaggacactctctctgaaggaataagacagtggtggaagctcaaacctggcccaccaccaccaaagcccgcagagcggcacaaggacgacagcaggggtcttgtgcttcctgggtacaagtacctcggacccttcaacggactcgacaagggagagccggtcaacgaggcagacgccgcggccctcgagcacgacaaggcctacgaccggcagctcgacagcggagacaacccgtacctcaagtacaaccacgccgacgcggagtttcaggagcgtcttaaagaagatacgtcttttgggggcaacctcggacgagcagtcttccaggccaaaaagaggattcttgaacctctgggcctggttgaggagcctgttaagacggctccgggaaaaaagaggccggtagagcactctcctgcggagccagattcctcctccggaactggaaagtcgggccaacagcctgcaagaaagagattgaattttggtcagactggagacgcagactccgtacctgacccccagcctctcggacagccaccagcagccccctctggtctgggaactaatacgatggcttcaggcagtggcgcaccaatggcagacaataacgagggcgccgacggagtgggtaattcctcgggaaattggcattgcgattccacatggatgggcgacagagtcatcaccaccagcacccgcacctgggctctgcccacctacaacaaccatctgtacaagcagatttccagccagtctggagccagcaacgacaaccactactttggctacagcaccccctgggggtattttgacttcaacagattccactgccacttctcctatcgtgactgggaaacactcatcaacaacaactggggattccggcccaagagactcagcttcaagctctttaacattcaagtcaaggaggtcacgcagaatgacggtacgacgacgattgccaataaccttaccagcacggttcaggtgtttactgactcggagtaccagctcccgtacgtcctcggctcggcgcatcaaggatgcctcccgccgttcccagcagacgtcttcatggtgccacagtatggatacctcaccctgaacaacggaagtcaggcggtaggacgctcttcattttactgcctggagtactttccttctcagatgctgcgtactggaaacaactttaccttcagctacacctttgaagacgttcctttccacagcagctacgctcacagccaaagtttggaccgtctcatgaatcctctcatcgaccagtacctgtattacttgagcagaacaaacacgccaagcggaaccaccacgatgtccaggcttcagttttctcaggccggagcaagtgacattcgggaccagtctagaaactggcttcctggaccctgttaccgccagcagcgagtatcaaagacagctgcggacaacaacaacagtgattactcgtggactggagctaccaagtaccacctcaatggaagagactctctggtgaatccgggcccagctatggccagccacaaggacgatgaagaaaaatattttcctcagagcggggttctcatctttggaaaacaagactcgggaaaaactaatgtggacattgaaaaggttatgattacagacgaagaggaaatcaggaccaccaatcccgtggctacggagcagtatggttctgtatctaccaacctccagagcggcaacacacaagcagctacctcagatgtcaacacacaaggcgttcttcctggcatggtctggcaggacagagacgtgtacctgcaggggcccatctgggcaaagattccccacacggatggacactttcacccttctcctcttatgggaggatttggactgaagcaccctcccccgcagattctcatcaagaataccccggtacctgcgaatccttcgaccaccttcagtgcggcaaagtttgcttctttcatcacacagtactccacggggcaggtcagcgtggagatagagtgggagctgcagaaggagaacagcaaacgctggaatcccgagatccagtatacttccaactataacaaatctgttaatgtggactttactgtggacactaatggtgtgtattcagagcctcgccccattggcaccagatacctgactcgtaatctgtaa

SEQ ID NO: 205 - DNA, 2211 bp, Adeno-Associated Virus
  source 1..2211: mol_type = other DNA; note = BCD_0146
atggctgccgatggttatcttccagattggctcgaggacaacctctctgagggaattcgcgagtggtggaacctgaaacctggagccccgaaacccaaagccaaccagcaaaagcaggacaccggccggggtctggtgcttcctggctacacgtacctcggacccttcaacggactcgacaagggggagcccgtcaacgcggcggacgcagcggccctcgagcacgacaaggcctacgaccagcagctccaagcgggtgataatccgtacctgcggtataatcacgccgacgccgagtttcaggagcgtctgcaagaagatacgtcttttgggggcaacctcgggcgagcagtctttcaggccaaaaagcgggttctcgaacctctgggcctagttgaatcgccggttaaaacggcacctggaaagaagagaccggtagagccctcaccgcagcgttctcccgactcctccacgggcatcggcaagaaaggccagcagcccgcgaaaaagagactcaattttgggcagactggcgactcagagtcagtgcccgaccctcaaccaatcggagaacctccagcaggcccctcaggtctgggatctggtacaatggctgcaggcggtggcgctccaatggcagacaataacgaaggcgccgacggagtgggtagttcctcaggaaattggcattgcgattccacatggctgggcgacagagtcatcaccaccagcacccgcacctgggccctgcccacctacaacaaccacctctacaagcaaatatcaagtcagagcggggccaccaacgacaaccacttcttcggctacagcaccccctgggggtattttgacttcaacagattccactgccacttctcaccacgtgactggcagcgactcatcaacaacaactggggattccggcccagaaagctgcggttcaagttgttcaacatccaggtcaaggaggtcacgcagaatgaaggcaccaagaccatcgccaataaccttaccagcacgattcaggtctttacggactcggaataccagctcccgtacgtcctcggctctgcgcaccagggctgcctgcctccgttcccggcggacgtcttcatgattccccagtacgggtacctgactctgaacaatggcagtcaggccgtgggccgttcctccttctactgcctggagtactttccttctcaaatgctgagaacgggcaacaactttgagttcagctaccagtttgaggacgtgccttttcacagcagctacgcgcacagccaaagcctggaccggctgatgaaccctctcatcgaccagtacctgtactatctgtctcggactcaatccacgggaggtaccacaagaactcagaagttgctattttctcaggccgggcctaataacatgtcggctcaggccaaaaactggctacccgggccctgctaccggcagcaacgcgtctccacaacaaccaaccagaataacaacagcaactttgcctggacgggtgccaccaagtatcatctgaatggcagagactctctggtaaatcctggcgttgccatggctacccacaaggacgacgaggagcgattttttccatccagcggagtcttgatgtttgggaaacagggagctggaaaagacaacgtggactatagcagcgtaatgctaaccagtgaggaagaaattaagaccaccaaccctgtagccacagaagagtacggcgtggtggccgataacctgcaacagcaaaacgtcgctcctattgtaggggccgtcaacagtcaaggagccttacctggcatggtatggcagaaccgggacgtgtacctgcagggtccaatctgggccaagattcctcacacggatggacactttcacccgtctcctctcatgggcggctttggacttaagcacccgcctcctcagatcctcatcaaaaacacgcctgttcctgcgaatcctccggcagagttttcagctacaaagtttgcttcattcatcacccaatactccacaggacaagtgagcgtggaaatcgaatgggagctgcaaaaagaaaacagcaagcgctggaatcccgaagtgcagtacacatctaattatgcaaaatctgccaacgttgatttcactgtggacaacaatggactttatactgagcctcgccccattggcacccgttacctcacccgtaatctgtaa

SEQ ID NO: 206 - DNA, 2226 bp, Adeno-Associated Virus
  source 1..2226: mol_type = other DNA; note = BCD_0157
atggctgctgacggttatcttccagattggctcgaggacaacctctctgaaggcattcgcgagtggtgggcgctgaaacctggagccccacaacccaaggccaaccaacagcatcaggacaacggcaggggtcttgtgcttcctgggtacaagtacctcggacccttcaacggactcgacaagggagagccggtcaacgaggcagacgccgcggccctcgagcacgacaaggcctacgacaagcagctcgagcagggggacaacccgtacctcaagtacaaccacgcggacgccgagtttcaggagcgtcttcaagaagatacgtcttttgggggcaacctcgggcgagcagtcttccaggccaaaaagaggattctcgagcctctgggtctggttgaggaagcggctaagacggctcctggaaagaagcgacctctagagaaaactcccaaccagcccacggacactcaggccgccgggcagactccagccaagaaaaggcagcagggcgagcaatctggcgacccagctagacgccgcctcgactttaaccaacaaccagcagaaccaatcggagaaccccccgcagccccctctggtgtgggatctactacaatggctacaggcggtggcgctccagtggcaagtgataacgagggcgccgacggagtgggtaattcctcaggaaattggcattgcgattccacatggctgggcgacagagtcatcaccaccagcacccgaacctgggccctccccacctacaacaaccacctctacaagcaaatctccagcggcacctcgggaggagcatcaaacaacaacgcctacttcggctacagcaccccctgggggtattttgacttcaacagattccactgccacttctcaccacgtgactggcagcgactcatcaacaacaactggggattccggcccaagagactcagcttcaagctcttcaacatccaggtcaaggaggtcacgcaaaatgacggcactacgaccatcgccaataacctcaccagcacggtgcaggtctttacggactcggagtaccagctgccctacgtcctcgggtcggcccaccagggctgcctcccgccgttcccggccgatgtcttcatgattccccagtatggatacctgaccctaaacgatggcagtcaagcagtgggacgctcttccttctactgcctggaatattttccatcgcagatgctgagaaccggtaacaacttctccttcagctacgtgtttgaagatgtgcccttccacagcagctacgcgcacagccagagcctggaccgactgatgaaccctctcatcgatcagtacctgtattatctgaacagaacacagggcaccacctctggaacaaccaaccaatcacggctgctgtttagccaggccggacctcaatccatgtctctgcaggccaaaaactggctacccgggccctgttaccgacaacagagactttcaaagactgctaatgccaaccacaacagtaatttcacctggacgggggcaactacttaccatctaaatggccgggactccctggtcaatccagggcctgctatggcctcgcacaaggacggagaagagcagttcttccctatgactggaaacctggtatttggaaaacaaggcatgggttcatcaaacgtggacatcgagaacgtcatgatcacagatgaagaagaaatcagaaccaccaatccagtggctacagagcagtacggaaatgtagcagacaaccttcagagctcaaacacagcgccaatcgtgggaaatgtcaacagccaaggagcactacccggtatggtctggcaggaccgggacgtgtacctgcagggccccatttgggccaagattcctcacacggacggacactttcacccgtctcccctgatgggcggctttggattgaagcacccgcctccccagattctcatcaagaatacgcccgtacctgcgaatcctccaacgtccttcaatccagcaaagttttcttcttttatcactcaatattctactggacaagtcagcgtggaaatagaatgggagctgcagaaggaaaacagcaagcgctggaacccggagattcagtacacctccaactacaacaagtctgttaatgtggactttactgtggacactaatggtgtgtattctgaacctcgccccattggcactcgttacctcacccgtaatctgtaa

SEQ ID NO: 207 - DNA, 2220 bp, Adeno-Associated Virus
  source 1..2220: mol_type = other DNA; note = BCD_0159
atggctgctgacggttatcttccagattggctcgaggacaacctctctgagggcattcgcgagtggctgaagctcaaagctggagcgccgcagccaaaacccaaccaacagcatcaggacaacggcaggggtcttgtgcttcctgggtacaagtacctcggacccttcaacggactcgacaagggagagccggtcaacgaggcagacgccgcggccctcgaccacgacaaggcctacgacaagcagctccaggccggagacaacccgtacctcaagtacaaccacgccgacgccgagtttcaggagcgcctggaaaaagatacgtcttttgggggcaatcttgggaaggcggtcttccaggccaagaagcgggttctcgaaccttttggcttggttgaggctccggttaagacggctcctggaaagaagaggccgttagaaaagactcccaaccagcccacggactctgaggccgcaggtcaggccccagctaaaaagaagcagcacggagaggagtctggagaccccgctaagcgccgactcagcttcagcgagaaggccccagaccagccaccagcaccaaatccagccaaccccccaagtgtgggacctgctacaatggcttcaggcggtgggtcaccagtggcagacaataatgagggtgccgacggagtgggtaattcctcgggaaattggcattgcgattccacatggctgggcgacagagtcatcaccaccagcacccgaacctgggccctgcccacctacaacaaccacctctacaagcaaatctccagccaaaacggagctacaaacgacaaccactacttcggctacagcaccccctggggatattttgatttcaacagattccactgccacttttcaccacgtgactggcaacgactcatcaacaacaactggggattccggcccaagcgactcagcttcaagctcttcaacatccaggtcaaggaggtcacgcagacggatggcactacgaccatcgccaataaccttaccagcacgattcaggtgtttacggactcggagtaccagctcccgtacgtcctcggctcggcgcacgaaggctgtctcccaccgttcccagccgacgtcttcatgattccccagtacggttacctgactctgaacaacggcagtcaggccgtgggacgctcttccttttactgcctggaatactttccctcacagatgctaagaactggcaataatttctcatacagctacgtgttcgaggatgtgccttttcacagcagctacgcgcacagccagagcctggacagactgatgaatcctctgattgaccagtacttgtattacctcagcaaaacacaaggcacaaacgccaccgttcagggggccaaactgcaattttcccaggccggtccttcaaacatgcgcgatcaggccagaaactggatgccagggccttgttacagacagcagcgcttgtctaaaaatgccggagacaacagcaacagtgagtatgcttggacagctgctactaaataccatcttaacggcagagactctcttgttaaccccggacctgccatggccagccacaaggacgacgaggagaagtttttccccatgaatggcactctgatatttggtaaaaacgggactggaaagtcaaatgtggatatagaaaatgttatgataacagatgaggaggaaattagaaccaccaatcccgtggccacagagcagtacggggtggtctcggacaacctacaaagctcaaataccaggcctgtaacgggggacgtggacagtcagggcgtcctacctggcatggtgtggcaagaccgcgacgtgtacctccagggtcccatttgggccaagattcctcatacggatggacattttcacccgtctcctctgatgggcggctttggcctgaagcatcctcctcctcagatcatgattaaaaacactccagttccggcgaatccggccactgtgttttcgcccgaaaagtttgcttcttttattacccagtactccaccggacaggtcagcgtggaaatcgaatgggagctgcagaaggaaaacagcaagcgatggaacccagagatccagtacacctctaactacaacaagtctgtaaatgtggactttactgtgaacgctgatggtgtttattctgaacctcgccctattggtactcgttacctcacccgtaatctgtaa

SEQ ID NO: 208 - DNA, 2220 bp, Adeno-Associated Virus
  source 1..2220: mol_type = other DNA; note = BCD_0160
atggctgctgacggttatcttccagattggctcgaggacaacctctctgaaggcattcgcgagtggtgggcgctgaaacctggagccccacaacccaaggccaaccaacagcatcaggacaacggcaggggtcttgtgcttcctgggtacaagtacctcggacccttcaacggactcgacaagggagagccggttaacgaggcagacgccgcggccctcgagcacgacaaggcctacgacaagcagctcgagcagggggacaacccgtacctcaagtacaaccacgcggacgccgagtttcaggagcgtcttcaagaagatacgtcttttgggggcaacctcgggcgagcagtcttccaggccaaaaagaggattctcgagcctctgggtctggttgaggaagcggctaagacggctcctggaaagaagcgacctctagagaaaacccccaaccagcccacggacactcaggccgccgggcagactccagccaagaaaaggcagcagggcgagcaatctggcgactccgctagacggcagctcgactttgatccacaaccagcagctcccatcggacaaccccccgcagccccctctcctgtgggatctaatacaatggcttcaggtggtggcggaccaatggcagacgataaccaaggcgccgacggagtgggtaatgcctcgggaaattggcattgcgattccacatggctgggcgacagagtcatcaccaccagcaccagaacctgggtcttgcccacctacaacaaccacatctacaagcaaatctccagcgagtcgggagccaccaacgacaaccactacttcggctacagcaccccctgggggtattttgacttcaacagattccactgccacttttcaccacgtgactggcagcgactcatcaacaacaactggggattccggcccaagcgactcaacttcaagatcttcaacatccaggtcaaagaagtcacgcagattgagggcggctcgaccatcgccaataaccttaccagcacgattcaggtctttgcggactcggagtaccagctgccctacgttctcggatcggctcaccagggctgcctcccgccgttcccggccgatgtcttcatgattccccagtacggatacctgactctgaacaacggcagccaatcagtgggacgctcttccttttactgcctggaatatttcccatcccagatgctgagaactggaaacaactttcaattcagctatacctttgaaagcgtgcctttccacagcagctacgcgcatagccagagcctggaccgcatcatgaaccccctggtggaccagtacctgtactacctggccagaactcagacgggaaccggaagcaccaccagcaacacgcggcagctgcagttttaccaggccgggccttccaacatggctgaccaatccaggaactggttgcctgggcccatgtaccgacagcagcgggtctccaagactctggaccaaaacagcaacaccaactttgcctggacggctgccagcaaatacaacctaaatggacgcaaatcattggttaatcctggcatttccatggcgacccacaaggacgacgaggagcgcttcttccctcagcacggggttctggtctttggaaaaacaaacgccaccaacaagaccactctggaaaacgtcctggtaacggatgaagaggaggtcaaggcgaccaatccggtgggcacagaggaatacgggactgtttccagcaacctgcaatccaacaccactaatcccacaacagagactgtcaacaaccagggaatactacccggtatggtctggcaggaccgggacgtgtacctgcagggccccatttgggccaagattcctcacactgacggacactttcatccgtctcccctaatgggcggctttggcctgaagcacccgcctccccaaattctcattaagaacaccccagtacctgcgaatcctccagagacttttaccacttccaagtttgccagctacatcacgcagtacagcaccgggcaggtcagcgtggaaattgaatgggagctgcagaaggaaaacagcaagcgctggaacccagagatccagtatacttccaactacgcgaaatccaacaatgtggagttctccgtggatgcagccggtgtttattccgaaccccgccctattggtactcgttacctcacccgtaatctgtaa

SEQ ID NO: 209 - DNA, 2220 bp, Adeno-Associated Virus
  source 1..2220: mol_type = other DNA; note = BCD_0161
atggctgctgacggttatcttccagattggctcgaggacaacctctctgaaggcattcgcgagtggtgggcgctgaaacctggagccccacaacccaaggccaaccaacagcatcaggacaacggcaggggtcttgtgcttcctgggtacaagtacctcggacccttcaacggactcgacaagggagagccggtcaacgaggcagacgccgcggccctcgagcacgacaaggcctacgacaagcagctcgagcagggggacaacccgtacctcaagtacaaccacgcggacgccgagtttcaggagcgtcttcaagaagatacgtcttttgggggcaacctcgggcgagcagtcttccaggccaaaaagaggattctcgagcctctgggtctggttgaggaagcggctaagacggctcctggaaagaagcgacctctagagaaaacccccaaccagcccacggacactcaggccgccgggcagactccagccaagaaaaggcagcagggcgagcaatctggcgactccgctagacggcagctcgactttgatccacaaccagcagctcccatcggacaaccccccgcagccccctctcctgtgggatctaatacaatggcttcaggtggtggcggaccaatggcagacgataaccaaggcgccgacggagtgggtaatgcctcgggaaattggcattgcgattccacatggctgggcgacagagtcatcaccaccagcaccagaacctgggtcttgcccacctacaacaaccacatctacaagcaaatctccagcgagtcgggagccaccaacgacaaccactacttcggctacagcaccccctgggggtattttgacttcaacagattccactgccacttttcaccacgtgactggcagcgactcatcaacaacaactgggaattccggcccaagcgactcaacttcaagatcttcaacatccaggtcaaagaagtcacgcagattgagggcggctcgaccatcgccaataaccttaccagcacgattcaggtctttgcggactcggagtaccagctgccctacgttctcggatcggctcaccagggctgcctcccgccgttcccggccgatgtcttcatgattccccagtacggatacctgactctgaacaacggcagccaatcagtgggacgctcttccttttactgcctggaatatttcccatcccagatgctgagaactggaaacaactttcaattcagctatacctttgaaagcgtgcctttccacagcagctacgcgcatagccagagcctggaccgcatcatgaaccccctggtggaccagtacctgtactacctggccagaactcagacgggaaccggaagcaccaccagcaacacgcggcagctgcagttttaccaggccgggccttccaacatggctgaccaatccaggaactggttgcctgggcccatgtaccgacagcagcgggtctccaagactctggaccaaaacagcaacaccaactttgcctggacggctgccagcaaatacaacctaaatggacgcaaatcattggttaatcctggcatttccatggcgacccacaaggacgacgaggagcgcttcttccctcagcacggggttctggtctttggaaaaacaaacgccaccaacaagaccactctggaaaacgtcctggtaacggatgaagaggaggtcaaggcgaccaatccggtgggcacagaggaatacgggactgtttccagcaacctgcaatccaacaccactaatcccacaacagagactgtcaacaaccagggaatactacccggtatggtctggcaggaccgggacgtgtacctgcagggccccatttgggccaagattcctcacactgacggacactttcatccgtctcccctaatgggcggctttggcctgaagcacccgcctccccaaattctcattaagaacaccccagtacctgcgaatcctccagagacttttaccacttccaagtttgccagctacatcacgcagtacagcaccgggcaggtcagcgtggaaattgaatgggagctgcagaaggaaaacagcaagcgctggaacccagagatccagtatacttccaactacgcgaaatccaacaatgtggagttctccgtggatgcagccggtgtttattccgaaccccgccctattggtactcgttacctcacccgtaatctgtaa

SEQ ID NO: 210 - DNA, 2220 bp, Adeno-Associated Virus
  source 1..2220: mol_type = other DNA; note = BCD_0165
atggctgctgacggttatcttccagattggctcgaggacaacctctctgaaggcatccgtgagtggtgggcgctgaaacctggagccccacaacccaaagcgaatcaacaacatcaggacaacagcaggggtcttgtgcttcctgggtacaagtacctcggacccttcaacggactcgacaagggagagccggtcaacgaggcagacgccgcggccctcgagcacgacaaggcctacgacaagcagctcgagcagggggacaacccgtacctcaagtacaaccacgcggacgccgagtttcaggagcgtcttcaagaagatacgtcttttgggggcaacctcgggcgagcagccttccaggccaaaaagaggattctcgagcctctgggtctggttgaggaagcggctaagacggctcctggaaagaagcgacctctagagaaaacccccaaccagcccacggacactcaggccgccgggcagactccagccaagaaaaggccacagggcgagcaatctggcgactccgctagacggcagctcgactttgatccacaaccagcagctcccatcggacaaccccccgcagccccctctcctgtgggatctaatacaatggcttcaggtggtggcggaccaatggcagacgataaccaaggcgccgacggagtgggtaatgcctcgggaaattgacattgcgattccacatggctgggcgacagagtcatcaccaccagcaccagaacctgggtcctgcccacctacaacaaccacatctacaagcaaatctccagcgaatcgggagccaccaacgacaaccactacttcggctacagcaccccctgggggtattttgacttcaacagattccactgccacttttcaccacgtgactggcagcgactcatcaacaacaactggggattccggcccaagcgactcaacttcaagatcttcaacatccaggtcaaagaagtcacgcagatcgagggcggctcgaccatcgccaataaccttaccagcacgattcaggtctttgcggactcggagtaccagctgccctacgtcctcggatcggcccaccagggctgcctcccgccgttcccggccgatgtcttcatgattccccagtatggatacctgactctgaacgacggcagccaatcagtgggacgttcttccttttactgtctggaatatttcccatcccagatgctgagaactggaaataactttcaattcagctacacctttgaaagcgtgcctttccacagcagctacgcgcacagccagagcctggaccgcatcatgaaccccctggtggaccagtacctgtactacttggccagaactcaaacgggtaccggaagcaccaccagtaacacgcggcagctgcagttttaccaggccgggccttccaacatggctgaccaatccaggaactggttgcctgggcccatgtaccggcagcagcgggtctccaagactctggaccaaaacagcaacaccaactttgcctggacggctgccagcaaatacaacctgaatggacgcaaatcattggctaatcctggtattgccatggcgactcacaaggacgatgaggagcgcttcttccctcagcacggggttctggtgtttggacggacaaacgctaccaacaagaccaccttggacaatgttttgattacagacgaagaagaaattaaggctactaacccggtggcaacagaggaatacgggactgtttccagcaacctgcaatccggttccaccaaccccaccacagagactgtcaacaaccagggaatacttcctggtatggtctggcaggaccgggacgtgtacctgcagggtcccatttgggccaaaattcctcacacggacggacactttcacccgtctcccctgatgggcggctttggactgaagcacccgcctccccagattctcatcaagaacaccccggtacctgcgaatcctccagaaactttcgctacttccaagtttgccagctacatcacacagtacagcaccggacaggtcagcgtggaaattgagtgggagttgcagaaagaaaacagcaagcgctggaatccagagattcagtacacttccaactacgcgaaatccaacaatgtggagttctccgtggatgcagccggtgtttattctgaaccccgccctattggtactcgttacctcacccgtaatctgtaa

SEQ ID NO: 211 - DNA, 2220 bp, Adeno-Associated Virus
  source 1..2220: mol_type = other DNA; note = BCD_0167
atggctgctgacggttatcttccagattggctcgaggacaacctctctgagggcattcgcgagtggctgaagctcaaagctggagcgccgcagccaaaacccaaccaacagcatcaggacaacggcaggggtcttgtgcttcctgggtacaagtacctcggacccttcaacggactcgacaagggagagccggtcaacgaggcagacgccgcggccctcgaccacgacaaggcctacgacaagcagctccaggccggagacaacccgtacctcaagtacaaccacgccgacgccgagtttcaggagcgcctggaaaaagatacgtcttttgggggcaatcttgggaaggcggtcttccaggccaagaagcgggttctcgaaccttttggcttggttgaggctccggttaagacggctcctggaaagaagaggccgttagaaaagactcccaaccagcccacggactctgaggccgcaggtcaggccccagctaaaaagaagcagcacggagaggagtctggagaccccgctaagcgccgactcagcttcagcgagaaggccccagaccagccaccagcaccaaatccagccaaccccccaagtgtgggacctgctacaatggcttcaggcggtgggtcaccagtggcagacaataatgagggtgccgacggagtgggtaattcctcgggaaattggcattgcgattccacatggctgggcgacagagtcatcaccaccagcacccgaacctgggccctgcccacctacaacaaccacctctacaagcaaatctccagccaaaacggagctacaaacgacaaccactacttcggctacagcaccccctggggatattttgatttcaacagattccactgccacttttcaccacgtgactggcaacgactcatcaacaacaactggggattccggcccaagcgactcagcttcaagctcttcaacatccaggtcaaggaggtcacgcagacggatggcactacgaccatcgccaataaccttaccagcacgattcaggtgtttacggactcggagtaccagctcccgtacgtcctcggctcggcgcacgaaggctgtctcccaccgttcccagccgacgtcttcatgattccccagtacggttacctgactctgaacaacggcagtcaggccgtgggacgctcttccttttactgcctggaatactttccctcacagatgctaagaactggcaataatttctcatacagctacgtgttcgaggatgtgccttttcacagcagctacgcgcacagccagagcctggacagactgatgaatcctctgattgaccagtacttgtattacctcagcaaaacacaaggcacaaacgccaccgttcagggggccaaactgcaattttcccaggccggtccttcaaacatgcgcgatcaggccagaaactggatgccagggccttgttacagacagcagcgcttgtctaaaaatgccggagacaacagcaacagtgagtatgcttggacagctgctactaaataccatcttaacggcagagactctcttgttaaccccggacctgccatggccagccacaaggacgacgaggagaagtttttccccatgaatggcactctgatatttggtaaaaacgggactggaaagtcaaatgtggatatagaaaatgttatgataacagatgaggaggaaattagaaccaccaatcccgtggccacagagcagtacggggtggtctcggacaacctacaaagctcaaataccaggcctgtaacgggggacgtggacagtcagggcgtcctacctggcatggtgtggcaagaccgcgacgtgtacctccagggtcccatttgggccaagattcctcatacggatggacattttcacccgtctcctctgatgggcggctttggcctgaagcatcctcctcctcagatcatgattaaaaacactccagttccggcgaatccggccactgtgttttcgcccgaaaagtttgcttcttttattacccagtactccaccggacaggtcagcgtggaaatcgaatgggagctgcagaaggaaaacagcaagcgctggaacccggagattcagtacacctccaactacaacaagtctgttaatgtggactttactgtggacaccaatggtgtttattctgaaccccgccctattggcactcgttacctcacccgtaatctgtaa

SEQ ID NO: 212 - DNA, 2220 bp, Adeno-Associated Virus
  source 1..2220: mol_type = other DNA; note = BCD_0168
atggctgctgacggttatcttccagattggctcgaggacaacctctctgagggcattcgcgagtggctgaagctcaaagctggagcgccgcagccaaaacccaaccaacagcatcaggacaacggcaggggtcttgtgcttcttgggtacaagtacctcggacccttcaacggactcgacaggggagagccggccaacgaggcagacgccgcggccctcgactacgacaaggcctacgacaagcagctccaggccggagacaacccgtacctcaagtacaaccacgccgacgccgagtttcaggagcgcctggaaaaagatacgtcttttgggggcaatcttgggaaggcggtcttccaggccaagaagcgggttctcgaaccttttggcttggttgaggctccggttaagacggctcctggaaagaagaggccgttagaaaagactcccaaccagcccacggactctgaggccgcaggtcaggccccagctaaaaagaagcagcacggagaggagtctggagaccccgctaagcgccgactcagcttcagcgagaaggccccagaccagccgccagcaccaaatccagccaaccccccaagtgtgggacctgctacaatggcttcaggcggtgggtcaccagtggcagacaataatgagggtgccgacggagtgggtaattcctcgggaaattggcattgcgattccacatggctgggcgacagagtcatcaccaccagcacccgaacctgggccctgcccacctacaacaaccacctctacaagcaaatctccagccaaaacggagctacaaacgacaaccactacttcggctacagcaccccctggggatattttgatttcaacagattccactgccacttttcaccacgtgactggcaacgactcatcaacaacaactggggattccggcccaagcgactcagcttcaagctcttcaacatccaggtcaaggaggtcacgcagacggatggcactacgaccatcgccaataaccttaccagcacgattcaggtgtttacggactcggagtaccagctcccgtacgtcctcggctcggcgcacgaaggctgtctcccaccgttcccagccgacgtcttcatgattccccagtacggttacctgactctgaacaacggcagtcaggccgtgggacgctcttccttttactgcctggaatactttccctcacagatgctaagaactggcaataatttctcatacagctacgtgttcgaggatgtgccttttcacagcagctacgcgcacagccagagcctggacagactgatgaatcctctgattgaccagtacttgtattacctcagcaaaacacaaggcacaaacgccaccgttcagggggccaaactgcaattttcccaggccggtccttcaaacatgcgcgatcaggccagaaactggatgccagggccttgttacagacagcagcgcttgtctaaaaatgccggagacaacagcaacagtgagtatgcttggacagctgctactaaataccatcttaacggcagagaccctcttgttaaccccggacctgccatggccagccacaaggacgacgaggagaagttcttccccatgaatggcactctgatatttggtaaaaacgggactggaaagtcaaatgtggatatagaaaatgttatgataacagatgaggaggaaattagaaccaccaatcccgtggccacagaacagtacggggtggtctcggacaacctacaaagctcaaataccaggcctgtaacgggggacgtggacagtcagggcgtcctacctggcatggcgtggcaagaccgcgacgtgtacctccagggtcccatttgggccaagattcctcatacggatggacattttcacccgtctcctctgatgggcggctttggcctgaagcatcctcctcctcagatcatgattaaaaacactccagttccggcgaatccggccactgtgttttcgcccgaaaagtttgcttcttttattacccagtactccaccggacaggtcagcgtggaaatcgaatgggagctgcagaaggaaaacagcaagcgctggagcccggagattcagtacacctccaactacaacaagtctgttaatgtggactttactgtggacaccaatggtgtttattctgaaccccgccctattggcactcgttacctcacccgtaatctgtaa

SEQ ID NO: 213 - DNA, 2220 bp, Adeno-Associated Virus
  source 1..2220: mol_type = other DNA; note = BCD_0169
atggctgctgacggttatcttccagattggctcgaggacaacctctctgagggcattcgcgagtggctgaagctcaaagctggagcgccgcagccaaaacccaaccaacagcatcaggacaacggcaggggtctcgtgcttcctgggtacaagtacctcggacccttcaacggactcgacaagggagagccggtcaacgaggcagacgccgcggccctcgaccacgacaaggcctacgacaagcagctccaggccggagacaacccgtacctcaagtacaaccacgccgacgccgagtttcaggagcgcctggaaaaagatacgtcttttgggggcaatcttgggaaggcggtcttccaggccaagaagcgggttctcgaaccttttggcttggttgaggctccggttaaggcggctcctggaaagaagaggccgttagaaaagactcccaaccagcccacggactctgaggccgcaggtcaggccccagctaaaaagaagcagcacggagaggagtctggagaccccgctaagcgccgactcagcttcagcgagaaggccccagaccagccaccagcaccaaatccagccaaccccccaagtgtgggacctgctacaatggcttcaggcggtgggtcaccagtggcagacaataatgagggtgccgacggagtgggtaattcctcgggaaattggcattgcgattccacatggctgggcgacagagtcaccaccaccagcacccgaacctgggccctgcccacctacaacaaccacctctacaagcaaatctccagccaaaacggagctacaaacgacaaccactacttcggctacagcaccccctggggatattttgatttcaacagattccactgccacttttcaccacgtgactggcaacgactcatcaacaacaactggggattccggcccaagcgactcagcttcaagctcttcaacatcctggtcaaggaggtcacgcagacggatggcactacgaccatcgccaataaccttaccagcacgattcaggtgtttacggactcggagtaccagctcccgtacgtcctcggctcggcgcacgaaggctgtctcccaccgttcccagccgacgtcttcatgattccccagtacggttacctgactctgaacaacggcagtcaggccgtggggcgctcttccttttactgcctggaatactttccctcacagatgctaagaactggcaataatttctcatacagctacgtgttcgaggatgtgccttttcacagcagctacgcgcacagccagagcctggacagactgatgaatcctctgattgaccagtacttgtattacctcagcaaaacacaaggcacaaacgccaccgttcagggggccagactgcaatttttccaggccggtccttcaaacatgcgcgatcaggccagaaactggatgccagggccttgttacagacagcagcgcttgtctaaaaatgccggagacaacagcaacagtgagtatgcttggacagctgctactaaataccatcttaacggcagagactctcttgttaaccccggacctgccatggccagccacaaggacgacgaggagaagtttttccccatgaatggcactctgatatttggtaaaaacgggactggaaagtcaaatgtggatatagaaaatgttatgataacagatgtggaggaaattagaaccaccaatcccgtggccacagagcagtacggggtggtctcggacaacctacaaagctcaaataccaggcctgtaacgggggacgtggacagtcagggcgtcctacctggcatggtgtggcaagaccgcgacgtgtacctccagggtcccatttgggccaagattcctcatacggatggacattttcacccgtctcctctgatgggcggctttggcctgaagcatccccctcctcagatcatgattaaaaacactccagttccggcgaatccggccactgtgttttcgcccgaaaagtttgcttcttttattacccagtactccaccggacaggtcagcgtggaaatcgaatgggagctgcagaaggaaaacagcaagcgatggaacccagagatccagtacacctctaactacaacaagtctgtaaatgtggactttactgtgaacgctgatggtgtttattctgaacctcgccctattggtactcgttacctcacccgtaatctgtaa

SEQ ID NO: 214 - DNA, 2220 bp, Adeno-Associated Virus
  source 1..2220: mol_type = other DNA; note = BCD_0170
atggctgctgacggttatcttccagattggctcgaggacaacctctctgagggcattcgcgagtggctgaagctcaaagctggagcgccgcagccaaaacccaaccaacagcatcaggacaacggcaggggtcttgtgcttcctgggtacaagtacctcggacccttcaacggactcgacaagggagagccggtcaacgaggcagacgccgcggccctcgacttcgacaaggcctacgacaagcagctccaggccggagacaacccgtacctcaagtacaaccacgccgacgccgagtttcaagagcgcctggaaaaagatacgtcttttgggggcaatcttgggaaggcggtcttccaggccaagaagcgggttctcgaaccttttggcttggttgaggctccggttaagacggctcctggaaagaagaggccgttagaaaagactcccagccagcccacggactctgaggccgcaggtcaggccccagctaaaaagaagcagcacggagaggagtctggagaccccgctaagcgccgactcagcttcagcgagaaggccccagaccagccaccagcaccaaatccagccaaccccccaagtgtgggacctgctacaatggcttcaggcggtgggtcaccagtggcagacaataatgagggtgccgacggagtgggtaattcctcgggaaattggcattgcgattccacatggctgggcgacagagtcatcaccaccagcacccgaacctgggccctgcccacctacaacaaccacctctacaagcaaatctccagccaaaacggagctacaaacgacaaccactacttcggctacagcaccccctggggatattttgatttcaacagattccactgccacttttcaccacgtgactggcaacgactcatcaacaacaactggggattccggcccaagcgactcagcttcaagctcttcaacatccaggtcaaggaggtcacgcagacggatggcactacgaccatcgccaataaccttaccagcacgattcaggtgtttacggactcggagtaccagctcccgtacgtcctcggctcggcgcacgaaggctgtctcccaccgttcccagccgacgtcttcatgattccccagtacggttacctgactctgaacaacggcagtcaggccgtgggacgctcttccttttactgcctggaatactttccctcacagatgctaagaactggcaataatttctcatacagctacgtgttcgaggatgtgccttttcacagcagctacgcgcacagccagagcctggacagactgatgaatcctctgattgaccagtacttgtattacctcagcaaaacacaaggcacaaacgccaccgttcagggggccaaactgcaattttcccaggccggtccttcaaacatgcgcgatcaggccagaaactggatgccagggccttgttacagacagcagcgcttgtctaaaaatgccggagacaacagcaacagtgagtatgcttggacagctgctactaaataccatcttaacggcagagactctcttgttaaccccggacctgccatggccagccacaaggacgacgaggagaagtttttccccatgaatggcactctgatatttggtaaaaacgggactggaaagtcaaatgtggatatagaaaatgttatgataacagatgaggaggaaattagaaccaccaatcccgtggccacagagcagtacggggtggtctcggacaacctacaaagctcaaataccaggcctgtaacgggggacgtggacagtcagggcgtcctacctggcatggtgtggcaagaccgcgacgtgtacctccagggtcccatttgggccaagattcctcatacggatggacattttcacccgtctcctctgatgggcggctttggcctgaagcatcctcctcctcagatcatgattaaaaacactccagttccggcgaatccggccactgtgttttcgcccgaaaagtctgcttcttttattacccagtactccaccggacaggtcagcgtggaaatcgaatgggagctgcagaaggaaaacagcaagcgctggaacccggagattcagtacacctccaactacaacaagtctgttaatgtggactttactgtggacaccaatggtgtttattctgaaccccgccctattggcacccgttacctcacccgtaatctgtaa

SEQ ID NO: 215 - DNA, 2220 bp, Adeno-Associated Virus
  source 1..2220: mol_type = other DNA; note = BCD_0171
atggctgctgacggttatcttccagattggctcgaggacaacctctctgagggcattcgcgagtggctgaagctcaaagctggagcgccgcagccaaaacccaaccaacagcatcaggacaacggcaggggtcttgtgcttcctgggtacaagtacctcggacccttcaacggactcgacaagggagagccggtcaacgaggcagacgccgcggccctcgaccacgacaaggcctacgacaagcagctccaggccggagacaacccgtacctcaagtacaaccacgccgacgccgagtttcaggagcgcctggaaaaagatacgtcttttgggggcaatcttgggaaggcggtcttccaggccaagaagcgggttctcgaaccttttggcttggttgaggctccggttaagacggctcctggaaagaagaggccgttagaaaagactcccatccagcccacggactctgaggccgcaggtcaggccccagctaaaaagaagcagcacggagaggagtctggagaccccgctaagcgccgactcagcttcagcgagaaggccccagaccagccaccagcaccaaatccagccaaccccccaagtgtgggacctgctacaatggcttcaggcggtgggtcaccagtggcagacaataatgagggtgccgacggagtgggtaattcctcgggaaattggcattgcgatcccacatggctgggcgacagagtcatcaccaccagcacccgaacctgggccctgcccacccacaacaaccacctctacaagcaaatctccagccaaaacggagctacaaacgacaaccactacttcggctacagcaccccctggggatattttgatttcaacagattccactgccacttttcaccacgtgactggcaacgactcatcaacaacaactggggattccggcccaagcgactcagcttcaagcccttcaacatccaggtcaaggaggtcacgcagacggatggcactacgaccatcgccaataaccttaccagcacgattcaggtgtttacggactcggagtaccagctcccgtacgtcctcggctcggcgcacgaaggctgtctcccaccgttcccggccgacgtcttcatgattccccagtacggttacctgactctgaacaacggcagtcaggccgtgggacgctcttccttttactgcctggaatactttccctcacagatgctaagaactggcaataatttctcatacagctacgtgttcgaggatgtgccttttcacagcagctacgcgcacagccagagcctgggcagactgatgaatcctctgattgaccagtacttgtattacctcagcaaaacacaaggcacaaacgccaccgttcagggggccaaactgcaattttcccaggccggtccttcaaacatgcgcgatcaggccagaaactggatgccagggccttgttacagacagcagcgcttgtctaaaaatgccggagacaacagcaacagtgagtatgcttggacagctgctactaaataccatcttaacggcagagactctcttgttaaccccggacctgccatggccagccacaaggacgacgaggagaagtttttccccatgaatggcactctgatatttggtaaaaacgggactggaaagtcaaatgtggatatagaaaatgttatgataacagatgaggaggaaattagaaccaccaatcccgtggccacagagcagtacggggtggtctcggacaacctacaaagctcaaataccaggcctgtaacgggggacgtggacagtcagggcgtcctacctggcatggtgtggcaagaccgcgacgtgtacctccagggtcccatttgggccaagattcctcatacggatggacattttcacccgtctcctctgatgggcggctttggcctgaagcatcctcctcctcagatcatgattaaaaacactccagttccggcgaatccggccactgtgttttcgcccgaaaagtttgcttcttttattacccagtactccaccggacaggtcagcgtggaaatcgaatgggagctgcagaaggaaaacagcaagcgatggaacccagagatccagtacacctctaactacaacaagtctgtaaatgtggactttactgtgaacgctgatggtgtttattctgaacctcgccctattggtactcgttacctcacccgtaatctgtaa

SEQ ID NO: 216 - DNA, 2220 bp, Adeno-Associated Virus
  source 1..2220: mol_type = other DNA; note = BCD_0172
atggctgctgacggttatcttccagattggctcgaggacaacctctctgagggcattcgcgagtggctgaagctcaaagctggagcgccgcagccaaaacccaaccaacagcatcaggacaacggcaggggtcttgtgcttcctgggtacaagtacctcggacccttcaacggactcgacaagggagagccggtcaacgaggcagacgccgcggccctcgactacgacaaggcctacgacaagcagctccaggccggagacaacccgtacctcaagtacaaccacgccgacgccgagtttcaggagcgcctggaaaaagatacgtcttttgggggcaatcttgggaaggcggtcttccaggccaagaagcgggttctcgaaccttttggcttggttgaggctccggttaagacggctcctggaaagaagaggccgttagaaaagactcccaaccagcccacggactctgaggccgcaggtcaggccccagctaaaaagaagcagcacggagaggagtctggagaccccgctaagcgccgactcagcttcagcgagaaagccccagaccagccaccagcaccaaatccagccaaccccccaagtgtgggacctgctacaatggcttcaggcggtgggtcaccagtggcagacaataatgagggtgccgacggagtgggtaattcctcgggaaattggcattgcgattccacatggctgggcgacagagtcatcaccaccagcacccgaacctgggccctgcccacctacaacaaccacctctacaagcaaatctccagccaaaacggagctacaaacgacaaccactacttcggctacagcaccccctggggatattttgatttcaacagactccactgccacttttcaccacgtgactggcaacgactcatcaacaacaactggggattccggcccaagcgactcagcttcaagctcttcaacatccaggtcaaggaggtcacgcagacggatggcactacgaccatcgccaataaccttaccagcacgattcaggtgtttacggactcggagtaccagctcccgtacgtcctcggctcggcgcacgaaggctgtctcccaccgttcccagccgacgtcttcatgattccccagtacggttacctgactctgaacaacggcagtcaggccgtgggacgctcttccttttactgcctggaatactttccctcacagatgctaagaactggcaataatttctcatacagctacgtgttcgaggatgtgccttttcacagcagctacgcgcacagccagagcctggacagactgatgaatcctctgattgaccagtacttgtattacctcagcaaaacacaaggcacaaacgccaccgttcagggggccaaactgcaattttcccaggccggtccttcaaacatgcgcgatcaggccagaaactggatgccagggccttgttacagacagcagcgcttgtctaaaaatgccggagacaacagcaacagtgagtatgcttggacagctgctactaaataccatcttaacggcagagactctcttgttaaccccggacctgccatggccagccacaaggacgacgaggagaagtttttccccatgaatggcactctgatatttggtaaaaacgggactggaaagtcaaatgtggatatagaaaatgttatgataacagatgaggaggaaattagaaccaccaatcccgtggctacagagcagtacggggtggtctcggacaacctacaaagctcaaataccaggcctgtaacgggggacgtggacagtcagggcgtcctacctggcatggtgtggcaagaccgcgacgtgtacctccagggtcccatttgggccaagattcctcatacggatggacattttcacccgtctcctctgatgggcggctttggcccgaagcatcctcctcctcagatcatgattaaaaacactccagttccggcgaatccggccactgtgttttcgcccgaaaagtttgcttcttttattacccagtactccaccggacaggtcagcgtggaaatcgaatgggagccgcagaaggaaaacagcaagcgctggaacccggagattcagtacacctccaactacaacaagtctgttaatgtggactttactgtggacaccaatggtgtttattctgaaccccgccctattggcactcgttacctcacccgtaatctgtaa

SEQ ID NO: 217 - DNA, 2220 bp, Adeno-Associated Virus
  source 1..2220: mol_type = other DNA; note = BCD_0174
atggctgctgacggttatcttccagattggctcgaggacaacctctctgaaggcatccgtgagtggtgggcgctgaaacctggagccccacaacccaaagcgaatcaacaacatcaggacaacagcaggggtcttgtgcttcctgggtacaagtacctcggacccttcaacggactcgacaagggagagccggtcaacgaggcagacgccgcggccctcgagcacgacaaggcctacgacaagcagctcgagcagggggacaacccgtacctcaagtacaaccacgcggacgccgagtttcaggagcgtcttcaagaagatacgtcttttgggggcaacctcgggcgagcagtcttccaggccaaaaagaggattctcgagcctctgggtctggttgaggaagcggctaagacggctcctggaaagaagcgacctctagagaaaacccccaaccagcccacggacactcaggccgccgggcagactccagccaagaaaaggccacagggcgagcaatctggcgactccgctagacggcagctcgactttgatccacaaccagcagctcccatcggacaaccccccgcagccccctctcctgtgggatctaatacaatggcttcaggtggtggcggaccaatggcagacgataaccaaggcgccgacggagtgggtaatgcctcgggaaattggcattgcgattccacatggctgggcgacagagtcatcaccaccagcaccagaacctgggtcctgcccacctacaacaaccacatctacaagcaaatctccagcgaatcgggagccaccaacgacaaccactacttcggctacagcaccccctgggggtattttgacttcaacagattccactgccacttttcaccacgtgactggcagcgactcatcaacaacaactggggattccggcccaagcgactcaacttcaagatcttcaacatccaggtcaaagaagtcacgcagatcgagggcggctcgaccatcgccaataaccttaccagcacgattcaggtctttgcggactcggagtaccagctgccctacgtcctcggatcggctcaccagggctgcctcccgccgttcccggccgatgtcttcatgattccccagtatggatacctgactctgaacaacggcagccaatcagtgggacgttcttccttttactgtctggaatatttcccatcccagatgctgagaactggaaataactttcaattcagctacacctttgaaagcgtgcctttccacagcagctacgcgcacagccagagcctggaccgcatcatgaaccccctggtggaccagtacctgtactacttggccagaactcaaacgggtaccggaagcaccaccagtaacacgcggcagctgcagttttaccaggccgggccttccaacatggctgaccaatccaggaactggttgcctgggcccatgtaccggcagcagcgggtctccaagactctggaccaaaacagcaacaccaactttgcctggacggctgccagcaaatacaacctgaatggacgcaaatcattggctaatcctggtattgccatggcgactcacaaggacgatgaggagcgcttcttccctcagcacggggttctggtgtttggacggacaaacgctaccaacaagaccaccttggacaatgttttgattacagacgaagaagaaattaaggctactaacccggtggcaacagaggaatacgggactgtttccagcaacctgcaatccggttccaccaaccccaccacagagactgtcaacaaccagggaatacttcctggtatggtctggcaggaccgggacgtgtacctgcagggtcccatttgggccaaaattcctcacacggacggacactttcacccgtctcccctgatgggcggctttggactgaagcacccgcctccccagattctcatcaagaacaccccggtacctgcgaatcctccagaaactttcactacttccaagtttgccagctacatcacacagtacagcaccggacaggtcagcgtggaaattgagtgggagttgcagaaagaaaacagcaagcgctggaatccagagattcagtacacttccaactacgcgaaatccaacaatgtggagttctccgtggatgcagccggtgtttattctgaaccccgccctattggtactcgttacctcacccgtaatctgtaa

SEQ ID NO: 218 - DNA, 2220 bp, Adeno-Associated Virus
  source 1..2220: mol_type = other DNA; note = BCD_0175
atggctgctgacggttatcttccagattggctcgaggacaacctctctgaaggcatccgtgagtggtgggcgctgaaacctggagccccacaacccaaagcgaatcaacaacatcaggacaacagcaggggtcttgtgcttccttggtacaagtacctcggacccttcaacggactcgacaagggagagccggtcaacgaggcagacgccgcggccctcgagcacgacaaggcctacgacaagcagctcgagcagggggacaacccgtacctcaagtacaaccacgcggacgccgagtttcaggagcgtcttcaagaagatacgtcttttgggggcaacctcgggcgagcagtcttccaggccaaaaagaggattctcgagcctctgggtctggttgaggaagcggctaagacggctcctggaaagaagcgacctctagagaaaacccccaaccagcccacggacactcaggccgccgggcagactccagccaagaaaaggccacagggcgagcaatctggcgactccgctagacggcagctcgactttgatccacaaccagcagctcccatcggacaaccccccgcagccccctctcctgtgggatctaatacaatggcttcaggtggtggcggaccaatggcagacgataaccaaggcgccgacggagtgggtaatgcctcgggaaattggcattgcgattccacatggctgggcgacagagtcatcaccaccagcaccagaacctgggtcctgcccacctacaacaaccacatctacaagcaaatctccagcgaatcgggagccaccaacgacaaccactacttcggctacagcaccccctgggggtattctgacttcaacagattccactgccacttttcaccacgtgactggcagcgactcatcaacaacaactggggattccggcccaagcgactcaacttcaagatcttcaacatccaggtcaaagaagtcacgcagatcgagggcggctcgaccatcgccaataaccttaccagcacgattcaggtctttgcggactcggagtaccagctgccctacgtcctcggatcggctcaccagggctgcctcccgccgttcccggccgatgtcttcatgattccccagtatggatacctgactctgaacaacggcagccaatcagtgggacgttcttccttttactgtctggaatatttcccatcccagatgctgagaactggaaataactttcaattcagctacacctttgaaagcgtgcctttccacagcagctacgcgcacagccagagcctggaccgcatcatgaaccccctggtggaccagtacctgtactacttggccagaactcaaacgggtaccggaagcaccaccagtaacacgcggcagctgcagttttaccaggccgggccttccaacatggctgaccaatccaggaactggttgcctgggcccatgtaccggcagcagcgggtctccaagactctggaccaaaacagcaacaccaactttgcctggacggctgccagcaaatacaacctgaatggacgcaaatcattggctaatcctggtattgccatggcgactcacaaggacgatgaggagcgcttcttccctcagcacggggttctggtgtttggacggacaaacgctaccaacaagaccaccttggacaatgttttgattacagacgaagaagaaattaaggctactaacccggtggcaacagaggaatacgggactgtttccagcaacctgcaatccggttccaccaaccccaccacagagactgtcaacaaccagggaatacttcctggtatggtctggcaggaccgggacgtgtacctgcagggtcccatttgggccaaaattcctcacacggacggacactttcacccgtctcccctgatgggcggctttggactgaagcacccgcctccccagattctcatcaagaacaccccggtacctgcgaatcctccagaaactttcactacttccaagtttgccagctacatcacacagtacagcaccggacaggtcagcgtggaaattgagtgggagttgcagaaagaaaacagcaagcgctggaatccagagattcagtacacttccaactacgcgaaatccaacaatgtggagttctccgtggatgcagccggtgtttattctgaaccccgccctattggtactcgttacctcacccgtaatctgtaa

SEQ ID NO: 219 - DNA, 2214 bp, Adeno-Associated Virus
  source 1..2214: mol_type = other DNA; note = BCD_0176
atggctgctgacggttatcttccagattggctcgaggacaacctctctgagggcattcgcgagtggtgggacctgaaacctggagccccgaaacccaaagccaaccagcaaaagcaggacgacggccggggtctggtgcttcctggctacaagtacctcggacccttcaacggactcgacaagggggagcccgtcaacgcggcggacgcagcggccctcgagcacgacaaggcctacgaccagcagctcaaagcgggtgacaatccgtacctgcggtataatcacgccgacgccgagtttcaggagcgtcttcaagaagatacgtcttttgggggcaacctcgggcgcgcagtcttccaggccaaaaagcgggttctcgaacctctgggcctggttgaatcgccggttaaaacggcacctggaaagaagagaccggtagagccctcaccgcagcgttctcccgactcctccacgggcatcggcaagaaaggccagcagcccgcgaaaaagagactcaattttgggcagactggcgactcagagtcagtccccgaccctcaaccaatcggagaaccaccagcaggcccctctggtctgggatctggtacaatggctgcaggcggtggcgcaccaatggctgacaataacgagggcgccgacggagtgggtaatgcctcaggaaattggcattgcgattccacatggctgggcgacagagtcatcaccaccagcacccgaacctgggccctgcccacctacaacaaccacctctacaagcaaatatccagccagtcagcagggagcaccaacgataacgtctatttcggctacagcaccccctgggggtattttgacttcaacagattccactgccacttctcaccacgtgactggcagcgactcatcaacaacaactggggattccggcccaagaagctcaacttcaagctcttcaacatccaagtcaaggaggtcacaacgaatgacggcgttacgaccatcgctaataaccttaccagcacggttcaggtcttctcggactcggaataccagctgccgtacgtcctcggctctgcgcaccagggctgcctgcctccgttcccggcggacgtgttcatgattccgcagtacggctacctgactctgaacaatggcagccaatcggtaggccgctcctccttctactgcttggagtactttccttctcaaatgctgagaacgggcaacaacttcaccttcagctacaccttcgaggatgtgcctttccacagcagctacgcgcacagccagagcctggatcggctgatgaatcccttaatcgaccagtacttgtactacctggccagaacacagagcaacgcaggaggtaccgccggcaatcgggaactgcagttttatcagggcggacctaccaccatggccgaacaagcaaagaactggctgcctggaccttgcttccggcaaaagagagtatccaaaacgctggatcaaaacaacaacagcaactttgcctggactggtgccaccaaataccatttaaatggaagaaattcattggttaatcctggtattgccatggcaacccataaagacgacgaggaacgcttcttcccttcgagcggagttttaatttttggcaaaactggagcaactaataaaactacattggaaaacgtgctcatgacaaatgaagaagaaattcgtcctaccaacccggtggctaccgaggaatacgggattgtgagcagcaacctgcaggcgtctagcactgcagcccagactcaagttgtcaacaaccagggagccttacctggcatggtctggcagaaccgggacgtgtacctgcagggtcccatctgggccaagattcctcacacggacggcaactttcacccgtctcctctgatgggtggctttggactgaaacacccgcctcctcagatcctgatcaaaaacacaccggtacctgctaaccctccagaagtgtttactcctgccaagtttgcctccttcatcacgcagtacagcaccggacaagtcagcgtggaaatcgagtgggagctgcagaaagagaacagcaagcgatggaacccagagattcagtatacctccaactttgacaaacaaactggagtggactttgccgttgacagccagggtgtttattcagagcctcgccccattggcacccgttacctcacccgtaatctgtaa

SEQ ID NO: 220 - DNA, 2217 bp, Adeno-Associated Virus
  source 1..2217: mol_type = other DNA; note = BCD_0177
atggctgctgacggttatcttccagattggctcgaggacaacctctctgagggaattcgcgagtggtgggacctgaaacctggagccccgaaacccaaagccaaccagcaaaagcaggacgacggccggggtctggtgcttcctggctacaagtacctcggacccttcaacggactcgacaagggggagcccgtcaacgcggcggacgcagcggccctcgagcacgacaaggcctacgaccagcagctccaagcgggtgacaatccgtacctgcggtataatcacgccgacgccgagtttcaggagcgtctgcaagaagatacgtcttttgggggcaacctcgggcgcgcagtctttcaggccaaaaagcgggttctcgaacctctgggcctggttgaatcgccggttaaaacggcacctggaaagaagagaccggtagagccctcaccgcagcgttctcccgactcctccacgggcatcggcaagaaaggccagcagcccgcgaaaaagagactcaattttgggcagactggcgactcagagtcagtgcccgaccctcaaccaatcggagaaccaccagcaggcccctctggtctgggatctggtacaatggctgcaggcggtggcgctccaatggcagacaataacgaaggcgccgacggagtgggtagttcctcaggaaattggcattgcgattccacatggctgggcgacagagtcatcaccaccagcacccgaacctgggccctccccacctacaacaatcacctctacaagcaaatctccaacgggacatcgggaggaagcaccaacgacaacacctactttggctacagcaccccctgggggtattttgacttcaacagattccactgccacttctcaccacgtgactggcagcgactcatcaacaacaactggggattccggcccaagcgactcaacttcaagctcttcaacatccaggtcaaggaggtcacgcagaatgaaggcaccaagaccatcgccaataaccttaccagcacgattcaggtctttacggactcggaataccagctgccgtacgtcctcggttcggcgcaccagggctgcctgcctccgttcccggcggacgtcttcatgattccccagtacgggtatctaacactaaacaatggcagtcaggccgtgggccgttcctccttctactgcctggaatactttccttctcaaatgctgagaacgggcaacaactttgaattcagctaccagtttgaggacgtgccttttcacagcagctacgcgcacagccaaagcctggaccggctgatgaaccctctcatcgaccagtacctgtactatctgtctcggactcagtccacgggaggtaccacaggaactcagcagttgctattttctcaggccgggcctaataacatgtcggctcaggccaaaaactggctacccgggccctgctaccggcagcaacgcgtctccacaacaaccaaccagaataacaacagcaactttgcctggacgggtgccaccaagtatcatctgaatggcagagactctctggtgaatcctggcgttgccatggctacccacaaggacgacgaggagcgattttttccatccagcggagtcttgatgtttgggaaacagggagctggaaaagacaacgtggactatagcagcgtaatgctaaccagtgaggaagaaattaagaccaccaaccctgtagccacagaacagtacggcgtggtggccgataacctgcaacagcaaaacgccgctcctattgtaggggccgtcaacagtcaaggagccttacctggcatggtatggcagaaccgggacgtgtacctgcagggtccaatctgggccaagattcctcatacggacggcaactttcatccctcgccgctgatgggaggctttggactgaaacatccgcctcctcagatcctgattaaaaacacacctgttcccgcggatcctccgaccaccttcaatcaggccaagctggcgtcgttcatcacgcagtacagcaccggccaggtcagcgtggagatcgagtgggagctacagaaggagaacagcaagcgctggaacccagaaattcagtacacctccaactactacaaatctacaaatgtggactttgctgtcaatactgagggtacttattctgagcctcgccccattggcactcgttacctcacccgtaatctgtaa

SEQ ID NO: 221 - DNA, 2187 bp, Adeno-Associated Virus
  source 1..2187: mol_type = other DNA; note = BCD_0178
atggctgctgacggttatcttccagattggctcgaggacaacctctctgagggcattcgcgagtggtgggacttgaaacctggagccccgaaacccaaagccaaccagcaaaagcaggacgacggccggggtctggtgcttcctggctacaagtacctcggacccttcaacggactcgacaagggggagcccgtcaacgcggcggacgcagcggccctcgagcacgacaaggcctacgaccagcagctcaaagcgggtgacaatccgtacctgcggtataaccacgccgacgccgagtttcaggagcgtctgcaagaagatacgtcttttgggggcaacctcgggcgagcagtcttccaggccaagaagcgggttctcgaacctctcggtctggttgaggaaggcgctaagacggctcctggaaagaagagacccgtagaatcccccgactcctccacgggcatcggcaagaaaggccagcagcccgctaaaaagagactcaattttggtcagactggcgactcagagtcagtccccgacccacaacctctcggagaacctccagcagccccctcaggtctgggacctactacaatggcttcaggcggtggcgctccaatggcagacaataacgaaggcgccgacggagtgggtaatgcctcaggaaattggcattgcgattccacatggctgggcgacagagtcatcaccaccagcacccgcacctgggccctgcccacctacaacaaccacctctacaagcaaatctcaagtcagagcggggctaccaacgacaaccacttcttcggctacagcaccccctgggggtattttgacttcaacagattccattgccacttctcaccacgtgactggcagcgactcatcaacaacaactggggattccggcccagaaagctgcggttcaagttgttcaacatccaggtcaaggaggtcacgacgaacgacggcgttacgaccatcgctaataaccttaccagcacgattcaggtcttctcggactcggagtaccaactgccgtacgtcctcggctctgcgcaccagggctgcctccctccgttcccggcggacgtgttcatgattcctcaatacggatacctgactctgaacaacggcagtcagtctgtgggtcgttcctccttctactgcctggagtactttccctctcagatgctgagaacgggcaataactttgaattcagctacaccttcgaggaagtgcctttccacagcagctacgcgcacagccagagcctggaccggctgatgaatcccctcatcgaccagtacctgtactacctggcccggacccagagcactacggggtccgcaagggagctgcagttccatcaggctgggcccaacaccatggccgagcaatcaaagaactggctgcccggaccctgttatcggcagcagagactgtcaaaaaacatagacagcaacaacaacagtaactttgcctggactggggccacgaaatatcatctgaatggtagaaattcattaaccaacccgggcgtagccatggccaccaacaaggacgacgaggaccagttcttccccattaacggagtgctggtttttggcaaaacgggagctgccaacaagacaacgctggaaaacgtgctaatgaccagcgaggaggagatcaagaccaccaatcctgtggctacagaagaatacggtgtggtctccagcaacctgcaatcatctacggccgggcctcaaacacaaactatcaacagccagggggctctgcccggcatggtctggcaaaaccgggacgtatatctgcagggtcctatctgggccaaaattcctcacacggacggcaactttcacccgtctcccctgatgggcggatttggactgaagcacccgcctccccagattcttatcaagaacacaccggtacctgctaatcctccagaggtgtttactcctgccaagtttgcttcattcatcacgcagtacagcaccggccaggtcagcgtggaaatcgagtgggagctgcagaaagaaaacagcaaacgctggaatccagagattcagtatacctccaattatgccaagtctaataatgtggaatttgctgttaacaacgaaggggtatatacagagcctcgccccattggcactcgttacctcacccgtaatctgtaa

SEQ ID NO: 222 - DNA, 2214 bp, Adeno-Associated Virus
  source 1..2214: mol_type = other DNA; note = BCD_0179
atggctgccgatggttatcttccagattggctcgaggacaacctctctgagggaattcgcgagtggtgggacctgaaacctggagccccgaaacccaaagccaaccagcaaaagcaggacgacggccggggtctggtgcttcctggctacaagtacctcggacccttcaacggactcgacaagggggagcccgtcaacgcggcggacgcagcggccctcgagcacgacaaggcctacgaccagcagctccaagcgggtgacaatccgtacctgcggtataatcacgccgacgccgagtttcaggagcgtctgcaagaagatacgtcttttgggggcaacctcgggcgcgcagtcttccaggccaaaaagcgggttctcgaacctctgggcctggttgaatcgccggttaaaacggcacctggaaagaagagaccggtagagccctcaccgcagcgttctcccgactcctccacgggcatcggcaagaaaggccagcagcccgcgaaaaagagactcaattttgggcagactggcgactcagagtcagtccccgaccctcaaccaatcggagaaccaccagcaggcccctctggtctgggatctggtacaatggctgcaggcggtggcgcaccaatggctgacaataacgagggcgccgacggagtgggtaatgcctcaggaaattggcattgcgattccacatggctgggcgacagagtcatcaccaccagcacccgaacctgggccctgcccacctacaacaaccacctctacaagcaaatatccagccagtcagcagggagcaccaacgataacgtctatttcggctacagcaccccctgggggtattttgacttcaacagattccactgccacttctcaccacgtgactggcagcgactcatcaacaacaactggggattccggcccaagaagctcaacttcaagctcttcaacatccaagtcaaggaggtcacaacgaatgacggcgttacgaccatcgctaataaccttaccagcacggttcaggtcttctcggactcggaataccagctgccgtacgtcctcggctctgcgcaccagggctgcctgcctccgttcccggcggacgtgttcatgattccgcagtacggctacctgactctgaacaatggcagccaatcggtaggccgctcctccttctactgcttggagtactttccttctcaaatgctgagaacgggcaacaacttcaccttcagctacaccttcgaggatgtgcctttccacagcagctacgcgcacagccagagcctggatcggctgatgaatcccttaatcgaccagtacttgtactacctggccagaacacagagcaacgcaggaggtaccgccggcaatcgggaactgcagttttatcagggcggacctaccaccatggccgaacaagcaaagaactggctgcctggaccttgcttccggcaacagagagtatccaaaacgctggatcaaaacaacaacagcaactttgcctggactggtgccaccaaataccatttaaatggaagaaattcattggttaatcctggtattgccatggcaacccataaagacgacgaggaacgcttcttcccttcgagcggagttttaatttttggcaaaactggagcaactaataaaactacattggaaaacgtgctcatgacaaatgaagaagaaattcgtcctaccaacccggtggctaccgaggaatacgggattgtgagcagcaacctgcaggcgtctagcactgcagcccagactcaagttgtcaacaaccagggagccttacctggcatggtctggcagaaccgggacgtgtacctgcagggtcccatctgggccaagattcctcacacggacggcaactttcacccgtctcctctgatgggtggctttggactgaaacacccgcctcctcagatcctgatcaaaaacacaccggtacctgctaaccctccagaagtgtttactcctgccaagtttgcctccttcatcacgcagtacagcaccggacaagtcagcgtggaaatcgagtgggagctgcagaaagagaacagcaagcgatggaacccagagattcagtatacctccaactttgacaaacaaactggagtggactttgccgttgacagccagggtgtttattcagagcctcgccccattggcacccgttacctcacccgcaacctgtaa

SEQ ID NO: 223 - DNA, 2211 bp, Adeno-Associated Virus
  source 1..2211: mol_type = other DNA; note = BCD_0180
atggctgctgacggttatcttccagattggctcgaggacaacctctctgagggcattcgcgagtggtgggacctgaaacctggagccccgaaacccaaagccaaccagcaaaagcaggacaacggccggggtctggtgcttcctggctacaagtacctcggacccttcaacggactcgacaagggggagcccgtcaacgcggcggacgcagcggccctcgagcacgacaaggcctacgaccagcagctcaaagcgggtgacaatccgtacctgcggtataaccacgccgacgccgagtttcaggagcgtctgcaagaagatacgtcttttggggggaacctcgggcgagcagtcttccaggccaagaagcgggttctcgaacctctgggcctggttgaggaaggcgctaagacggctcctggaaagaagagaccggtagagcagtcgccacaagagccagactcctcctcgggcattggcaagacaggccagcagcccgctaaaaagagactcaattttggtcagactggcgactcagagtcagtccccgacccacaacctctcggagaacctccagcagccccctcaggtctgggacctaatacaatggcttcaggcggtggcgctccaatggcagacaataacgaaggcgccgacggagtgggtaattcctcgggaaattggcattgcgattccacatggctgggggacagagtcatcaccaccagcacccgaacctgggccctgcccacctacaacaaccacctctacaagcaaatctccaacggcacctcgggaggaagcaccaacgacaacacctactttggctacagcaccccctgggggtattttgacttcaacagattccactgccacttttcaccacgtgactggcagcgactcatcaacaacaattggggattccggcccaagagactcaacttcaagctcttcaacatccaggtcaaggaagtcacgacgaacgaaggcaccaagaccatcgccaataatctcaccagcaccgtgcaggtctttacggactcggagtaccagctaccgtacgtgctaggatcagctcaccagggatgtctgcctccgttcccggcggacgtcttcatggttcctcagtacggttatctaactctgaacaatggcagccaggccctgggacgttcctccttctactgcctggagtatttcccatcgcagatgctgagaaccggcaacaactttcagttcagctacaccttcgaggacgtgcctttccacagcagctacgcgcacagccagagcctggacaggttgatgaatcccctcatcgaccagtacctgtattatctggtcagaacacaaacaactggaactggagggacgcagactctggcattcagccaagcaggtcctagctcaatggccaaccaggctagaaactgggtgcccggaccgagctaccggcagcagcgcgtctccacgacaaccaaccagaacaacaacagcaactttgcctggacgggagctgccaagtttaagctgaacggccgagactctctaatgaatcccggcgtggccatggcttcccacaaggatgacgatgaccgcttcttcccttcgagcggggtccttatttttggcaagcaaggagccgggaacgatggagtggactacagccaagtgctgattacagacgaggaagaaatcaaggctaccaatcccgtggccacagaggaatatggagcagtggccatcaacaaccaggccgctaatacgcaggcgcagaccggactcgtgcacaaccagggggtgattcccggcatggtgtggcagaatagagacgtgtacctgcagggtcccatctgggccaaaattcctcacacggacggcaactttcacccgtctcccctgatgggcggctttggactgaagcacccgcctcctcaaattctcatcaagaacacaccggttccagcggacccgccgcttaccttcaaccaggccaagctgaactctttcatcacgcagtacagcaccggacaggtcagcgtggaaatcgagtgggagctgcagaaagaaaacagcaaacgctggaatccagagattcaatacacttccaactactacaaatctacaagtgtggactttgctgtcaacacggaaggagtttatagcgagcctcgccccattggcacccgttacctcacccgtaatctgtaa

SEQ ID NO: 224 - DNA, 2217 bp, Adeno-Associated Virus
  source 1..2217: mol_type = other DNA; note = BCD_0181
atggctgctgacggttatcttccagattggctcgaggacaacctctctgagggcattcgcgagtggtgggacttgaaacctggagccccgaaacccaaagccaaccagcaaaagcaggacgacggccggggtctggtgcttcctggctacaagtacctcggacccttcaacggactcgacaagggggagcccgtcaacgcggcggacgcagcggccctcgagcacgacaaggcctacgaccagcagctcaaagcgggtgacaatccgtacctgcggtataaccacgccgacgccgagtttcaggagcgtctgcaagaagatacgtcttttgggggcaacctcgggcgagcagtcttccaggccaagaagcgggttctcgaacctctcggtctggttgagacgccagctaagacggctcctggaaagaagagaccggtagagccatcaccccagcgttctccagactcctctacgggcatcggcaagaaaggccagcagcccgcgaaaaagagactcaactttgggcagactggcgactcagagtcagtgcccgaccctcaaccaatcggagaaccaccagcaggcccctctggtctgggatctggtacaatggctgcaggcggtggcgctccaatggcagacaataacgaaggcgccgacggagtgggtagttcctcaggaaattggcattgcgattccacatggctgggcgacagagtcatcaccaccagcaccagaacttgggccctccccacctacaacaaccacctctacaagcaaatctccaacgggacttcgggaggaagcaccaacgacaacacctacttcggctacagcaccccctgggggtattttgactttaacagattccattgccacttctcaccacgtgactggcagcgactcatcaacaacaactggggattccggcccaagcgactcaacttcaagctcttcaacatccaggtcaaggaggtcacgcaaaatgaaggcaccaagaccatcgccaataaccttaccagcacgattcaggtctttacggactcggaataccagctcccgtacgtcctcggctctgcgcaccagggctgcctgcctccgttcccggcggacgtcttcatgattcctcagtatggctatctgacgctgaacaatggcagtcaggccgtgggccgttcctctttctactgcctggagtactttccttctcaaatgctgagaactggcaacaattttaccttcagctacaccttcgaggacgtgcctttccacagcagctacgcgcacagccaaagcctggaccggctgatgaaccccctcgtcgaccagtacctgtactacctgtctcggactcagtccacgggaggtaccgcaggaactcagcagttgctattttctcaggccgggcctaataacatgtcggctcaggccaaaaactggctacccgggccctgctaccggcagcaacgcgtctccacgacactgtcgcaaaataacaacagcaactttgcctggaccggtgccaccaagtatcatctgaatggcagagactctctggtaaatcccggtgtcgctatggcaacccacaaggacgacgaagagcgattttttccgtccagcggagtcttgatgtttgggaaacagggagctggaaaagacaacgtggactatagcagcgttatgctaaccagtgaggaagaaatcaaaaccaccaacccagtggccacagaacagtacggcgtggtggccgataacctgcaacagcaaaacgccgctcctattgtaggggccgtcaacagtcaaggagccttacctggcatggtctggcagaaccgggacgtgtacctgcagggtcctatctgggccaagattcctcacacggacggaaactttcatccctcgccgctgatgggaggctttggactgaaacacccgcctcctcagatcctgattaagaatacacctgttcccgcggatcctccaactaccttcagtcaagccaagctggcgtcgttcatcacgcagtacagcaccggacaggtcagcgtggaaattgaatgggagctgcagaaagagaacagcaagcgctggaatccagaaatccaatatacttccaactactacaaatctacaaatgtggactttgctgttaacacagatggtacttattctgagcctcgccccattggcacccgttacctcacccgtaatctgtaa

SEQ ID NO: 225 - DNA, 2211 bp, Adeno-Associated Virus
  source 1..2211: mol_type = other DNA; note = BCD_0182
atggctgctgacggttatcttccagattggctcgaggacaacctctctgagggcattcgcgagtggtgggacttgaaacctggagccccgaaacccaaagccaaccagcaaaagcaggacgacggccggggtctggtgcttcctggctacaagtacctcggacccttcaacggactcgacaagggggagcccgtcaacgcggcggacgcagcggccctccagcacgacaaggcctacgaccagcagctcaaagcgggtgacaatccgtacctgcggtataaccacgccgacgccgagtttcaggagcgtctgcaagaagatacgtcttttgggggcaacctcgggcgagcagtcttccaggccaagaagcgggttctcgaacctctcggtctggttgaggaaggcgctaagacggctcctggaaagaagagaccggtagagcagtcgccacaagagccagactcctcctcgggcattggcaagacaggccagcagcccgctaaaaagagactcaattttggtcagactggcgactcagagtcagtccccgacccacaacctctcggagaacctccagcagccccctcaggtctgggacctaatacaatggcttcaggcggtggcgctccaatggcagacaataacgaaggcgccgacggagtgggtaattcctcgggaaattggcattgcgattccacatggctgggggacagagtcatcaccaccagcacccgaacctgggccctgcccacctacaacaaccacctctacaagcaaatctccaacggcacctcgggaggaagcaccaacgacaacacctactttggctacagcaccccctgggggtattttgacttcaacagattccactgccacttttcaccacgtgactggcagcgactcatcaacaacaattggggattccggcccaagagactcaacttcaagctcttcaacatccaggtcaaggaagtcacgacgaacgaaggcaccaagaccatcgccaataatctcaccagcaccgtgcaggtctttacggactcggagtaccagctaccgtacgtgctaggatcagctcaccagggatgtctgcctccgttcccggcagacgtattcatggttcctcagtacggctatttaactctgaacaatggtagccaggccctgggacgctcctccttctactgcctggagtatttcccatcgcagatgctgagaaccggcaataactttcagttcagctacaccttcgaggacgtgcctttccacagcagctacgcacacagccaaagcctggaccggctgatgaatcccctcattgaccagtacctgtattacctggtcagaacgcagacgactggaaccggagggacgcagactctggcattcagccaagcaggtcctagctcaatggccaaccaggctagaaactgggtacccggaccttgttaccggcagcagcgcgtctccacaacaaccaaccaaaacaacaacagcaactttgcctggacgggagctgccaagtttaagctgaacggccgagactctctaatgaatcccggcgtggccatggcttcccacaaggatgacgacgaccgcttcttcccttcgagcggggtcctgatttttggcaaacaaggagccgggaacgatggagtggattacagccaagtgctgattacagatgaagaagaaatcaaggctaccaaccctgtggccacagaggaatatggagcagtggccatcaacaaccaggccgccaatacgcaggcgcagaccggactcgtgcacaaccagggggtgattcccggcatggtgtggcagaatagagacgtgtacctgcagggtcccatctgggccaaaattcctcacacggacggcaactttcacccgtctcccctgatgggcggctttggactgaagcacccgcctcctcaaattctaatcaagaacacaccggttccagctgacccgccgcttaccttcaaccaggccaagctgaactctttcatcacgcagtacagcaccggacaggtcagcgtggaaatcgagtgggagctgcagaaagaaaacagcaaacgctggaatccagagattcaatacacttccaactactacaaatctacaaatgtggactttgctgtcaacacggaaggggtttatagcgagcctcgccccattggcacccgttacctcacccgtaatctgtaa

SEQ ID NO: 226 - DNA, 2211 bp, Adeno-Associated Virus
  source 1..2211: mol_type = other DNA; note = BCD_0185
atggctgccgatggttatcttccagattggctcgaggacaacctctctgagggcattcgcgagtggtgggacctgaaacctggagccccgaaacccaaagccaaccagcaaaagcaggacgacggccggggtctggtgcttcctggctacaagtacctcggacccttcaacggactcgacaagggggagcccgtcaacgcggcggacgcagcggccctcgagcacgacaaggcctacgaccagcagctcaaagcgggtgacaatccgtacctgcggtataatcacgccgacgccgagtttcaggagcgtctgcaagaagatacgtcatttgggggcaacctcgggcgagcagtcttccaggccaagaagcgggttctcgaacctctcggtctggttgaggaaggcgctaagacggctcctggaaagaagagaccggtagagcagtcaccccaagaaccagactcatcctcgggcatcggcaaaacaggccagcagcccgctaaaaagagactcaattttggtcagactggcgactcagagtcagtccccgacccacaacctctcggagaacctccagcagccccctcaggtctgggacctaatacaatggcttcaggcggtggcgctccaatggcagacaataacgaaggcgccgacggagtgggtaattcctcgggaaattggcattgcgattccacatggctgggggacagagtcatcaccaccagcacccgaacctgggcattgccaacctacaacaaccacctctacaagcaaatctccaacggtacctcgggaggaagcacgaacgacaacacctactttggctacagcaccccctgggggtattttgacttcaacagattccactgccacttctcaccacgtgactggcagcgactcatcaacaacaactggggattccggcccaagagactcaacttcaagctgttcaacatccaggtcaaggaggtcacgacgaacgaaggcaccaagaccatcgccaataacctcaccagtaccgtccaggtctttacggactcggagtaccagctaccgtacgtgctaggctccgcccatcaaggatgcctgcctccgtttcctgcggacgtcttcatggttcctcagtacggctacctgacgctcaacaatggcagtcaggctttgggacgttcttccttctactgtctggaatacttcccttctcagatgctgagaaccggcaacaactttcagttcagctacactttcgaggacgtgcctttccacagcagctacgcgcacagccagagtctggatcggctgatgaaccccctcatcgaccagtacctctactacctggtcagaacacagacaactggaactgggggaactcagactttggcattcagccaagcaggccctagctcaatggccaatcaggctagaaactgggtacccgggccttgctaccgtcagcagcgcgtctccacaaccaccaaccaaaataacaacagcaactttgcgtggacgggagctgctaaattcaagctgaacggcagagactcgctaatgaatcctggcgtggctatggcatcgcacaaagacgacgaggaccgcttctttccatcgagtggcgttctcatatttggcaagcagggagccggaaacgatggagtcgactacagccaggttctaattacagatgaagaagaaattaaagccaccaaccctgtcgccacagaggaatacggagcagtagccatcaacaaccaggccgctaacacgcaggcgcaaactggactggtgcataaccagggagttattcctggtatggtctggcagaatcgggacgtgtacctgcagggccctatttgggctaaaatacctcacacggatggcaactttcacccgtctcctcttatgggtggatttggactcaaacatccgcctcctcagattctaatcaaaaacacaccggtgccggcagatcctcctcttaccttcaatcaagcaaagctaaactccttcatcacgcagtacagcacgggacaagtcagcgtggaaatcgagtgggagctgcagaaggagaacagcaagcgctggaacccagagattcagtacacttccaactattataaatctacaaatgtggactttgctgttaatactgagggtgtttactctgagcctcgccccattggcactcgttacctcacccgcaacctgtaa

SEQ ID NO: 227 - DNA, 2217 bp, Adeno-Associated Virus
  source 1..2217: mol_type = other DNA; note = BCD_0186
atggctgccgatggttatcttccagattggctcgaggacaacctctctgagggcattcgcgagtggtgggacctgaaacctggagccccgaaacccaaagccaaccagcaaaagcaggacgacggccggggtctggtgcttcctggctacaagtacctcggacccttcaacggactcgacaagggggagcccgtcaacgcggcggacgcagcggccctcgagcacgacaaggcctacgaccagcagctcaaagcgggtgacaatccgtacctgcggtataatcacgccgacgccgagtttcaggagcgtctgcaagaagatacgtcttttgggggcaacctcgggcgagcagtcttccaggccaagaagcgggttctcgaacctctcggtctggttgaggaaggcgctaaaacggctcctggaaagaagagaccggtagagccgtcaccgcagcgttcccccgactcctccacgggcatcggcaagaaaggccagcagcccgccagaaagagactcaatttcggtcagattggcgactcagagtcagtccccgaccctcaacctctcggagaacctccagcagcgccctctagtgtgggatctggtacaatggctgcaggcggtggcgcaccaatggcagacaataacgaaggtgccgacggagtgggtagttcctcgggaaattggcattgcgattccacatggctgggcgacagagtcatcaccaccagcacccgaacctgggccctgcccacctacaacaaccacctctacaagcaaatctccaacgggacctcgggaggcagcaccaacgacaacacctacttcggctacagcaccccctgggggtattttgactttaacagattccactgccacttctcaccacgtgactggcagcgactcatcaacaacaactggggattccggcccaagagactcagcttcaagctcttcaacatccaggtcaaggaggtcacgcagaatgaaggcaccaagaccatcgccaataacctcaccagcaccatccaggtgtttacggactcggaataccagctgccgtacgtcctcggctctgcgcaccagggctgcctgcctccgttcccggcggacgtcttcatgatccctcagtacggctacctgactctcaacaatggcagtcaggccgtgggacgttcatccttctactgcctggagtacttcccctctcagatgctgagaacgggcaacaacttctccttcagctacacctttgaggacgtgcctttccacagcagctacgcgcacagccagagcctggaccggctgatgaatcccctcatcgaccagtacctgtactacctgtcaagaacccagtccacaggcggtacagcgggaacccagcagttgctgttctctcaagccgggcctagcaacatgtcggctcaggctagaaactggctgcccggaccctgctatcggcagcagcgcgtctccacgacactgtcgcaaaacaacaacagcaactttgcctggactggtgccaccaagtatcacctgaacggcagagactctctggtgaatccgggcgtcgccatggcaaccaacaaggacgacgaggaccgcttcttcccatctagcggcatcctcatgtttggcaagcagggagctggaaaagacaacgtggactatagcaatgtgatgctgaccagcgaggaagaaattaagaccaccaatcccgtggccacagaacagtatggcgtggtggcagataacctgcaacagcaaaacaccgctcctattgtaggggccgtcaacagccaaggagccttacctggcatggtctggcagaaccgggacgtgtacctgcagggtccaatctgggccaaaattcctcacacggatggcaactttcatccgtctcctctgatgggaggctttggacttaaacatccgcctcctcagatcctcatcaagaacactcctgttcctgcggaccctccgacggcgttcaaccaggccaagctgaactcttttatcacgcagtacagcaccggacaagtcagcgtggagatcgagtgggagctgcagaaggaaaacagcaagcgctggaacccagagattcagtatacctccaactactacaaatctacaaatgtggactttgctgtcaatactgagggtgtttattctgagcctcgccccattggcactcgttacctcacccgcaacctgtaa

SEQ ID NO: 228 - DNA, 2217 bp, Adeno-Associated Virus
  source 1..2217: mol_type = other DNA; note = BCD_0187
atggctgccgatggttatcttccagattggctcgaggacaacctctctgagggcattcgcgagtggtgggacctgaaacctggagccccgaaacccaaagccaaccagcaaaagcaggacgacggccggggtctggtgcttcctggctacaagtacctcggacccttcaacggactcgacaagggggagcccgtcaacgcggcggacgcagcggccctcgagcacgacaaggcctacgaccagcagctcaaagcgggtgacaatccgtacctgcggtataatcacgccgacgccgagtttcaggagcgtctgcaagaagatacgtcttttgggggcaacctcgggcgagcagtcttccaggccaagaagcgggttctcgaacctctcggtctggttgaggaaggcgctaaaacggctcctggaaagaagagaccggtagagccgtcaccgcagcgttcccccgactcctccacgggcatcggcaagaaaggccagcagcccgccagaaagagactcaatttcggtcagactggcgactcagagtcagtccccgaccctcaacctctcggagaacctccagcagcgccctctagtgtgggatctggtacaatggctgcaggcggtggcgcaccaatggcagacaataacgaaggtgccgacggagtgggtagttcctcgggaaattggcattgcgattccacatggctgggcgacagagtcatcaccaccagcacccgaacctgggccctgcccacctacaacaaccacctctacaagcaaatctccaacgggacctcgggaggcagcaccaacgacaacacctacttcggctacagcaccccctgggggtattttgactttaacagattccactgccacttctcaccacgtgactggcagcgactcatcaacaacaactggggattccggcccaagagactcagcttcaagctcttcaacatccaggtcaaggaggtcacgcagaatgaaggcaccaagaccatcgccaataacctcaccagcaccatccaggtgtttacggactcggaataccagctgccgtacgtcctcggctctgcgcaccagggctgcctgcctccgttcccggcggacgtcttcatgatccctcagtacggctacctgactctcaacaatggcagtcaggccgtgggacgttcatccttctactgcctggagtacttcccctctcagatgctgagaacgggcaacaacttctccttcagctacacctttgaggacgtgcctttccacagcagctacgcgcacagccagagcctggaccggctgatgaatcccctcatcgaccagtacctgtactacctgtcaagaacccagtccacaggcggtacagcgggaacccagcagttgctgttctctcaagccgggcctagcaacatgtcggctcaggctagaaactggctgcccggaccctgctatcggcagcagcgcgtctccacgacactgtcgcaaaacaacaacagcaactttgcctggactggtgccaccaagtatcacctgaacggcagagactctctggtgaatccgggcgtcgccatggcaaccaacaaggacgacgaggaccgcttcttcccatctagcggcatcctcatgtttggcaagcagggagctggaaaagacaacgtggactatagcaatgtgatgctgaccagcgaggaagaaattaagaccaccaatcccgtggccacagaacagtatggcgtggtggcagataacctgcaacagcaaaacaccgctcctattgtaggggccgtcaacagccaaggagccttacctggcatggtctggcagaaccgggacgtgtacctgcagggtccaatctgggccaaaattcctcacacggatggcaactttcatccgtctcctctgatgggaggctttggacttaaacatccgcctcctcagatcctcatcaagaacactcctgttcctgcggaccctccgacggcgttcaaccaggccaagctgaactcttttatcacgcagtacagcaccggacaagtcagcgtggagatcgagtgggagctgcagaaggaaaacagcaagcgctggaacccagagattcagtatacctccaactactacaaatctacaaatgtggactttgctgtcaatactgagggtgtttattctgagcctcgccccattggcactcgttacctcacccgcaacctgtaa

SEQ ID NO: 229 - DNA, 2214 bp, Adeno-Associated Virus
  source 1..2214: mol_type = other DNA; note = BCD_0188
atggctgccgatggttatcttccagattggctcgaggacaacctctctgagggcattcgcgagtggtgggacctgaaacctggagccccgaaacccaaagccaaccagcaaaagcaggacgacggccggggtctggtgcttcctggctacaagtacctcggacccttcaacggactcgacaagggggagcccgtcaacgcggcggacgcagcggccctcgagcacgacaaggcctacgaccagcagctcaaagcgggtgacaatccgtacctgcggtataatcacgccgacgccgagtttcaggagcgtctgcaagaagatacgtcatttgggggcaacctcgggcgagcagtcttccaggccaagaagcgggttctcgaacctctcggtctggttgaggaaggcgctaagacggctcctgcaaagaagagaccggtagagccgtcaccacagcgttcccccgactcctccacgggcatcggcaagaaaggccagcagcccgccagaaagagactcaatttcggtcagactggcgactcagagtcagtccccgaccctcaacctctcggagaacctccagcagcgccctctagtgtgggatctggtacagtggctgcaggcggtggcgcaccaatggcagacaataacgaaggtgccgacggagtgggtaatgcctcaggaaattggcattgcgattccacatggctgggcgacagagtcatcaccaccagcacccgaacctgggccctgcccacctacaacaaccacctctacaagcaaatctccagtgaaactgcaggtagtaccaacgacaacacctacttcggctacagcaccccctgggggtattttgacttcaacagattccactgccacttctcaccacgtgactggcagcgactcatcaacaacaactggggattccggcccaagaagctgcggttcaagctcttcaacatccaggtcaaggaggtcacgacgaatgacggcgttacgaccatcgctaataaccttaccagcacgattcaggtcttctcggactcggaataccagctgccgtacgtcctcggctctgcgcaccagggctgcctgcctccgttcccggcggacgtcttcatgattcctcagtacggctacctgactctgaacaatggcagtcagtctgtgggacgttcctccttctattgcctggagtactttccctctcagatgctgagaacgggcaacaactttgagttcagctacagcttcgaggacgtgcctttccacagcagctacgcgcacagccagagcctggaccggctgatgaatcccctcatcgaccagtacctgtattacttggccagaacacagagtaacccaggaggcacagctggcactcgggaactgcagttttaccagggcgggccttccaccatggccgaacaagccaagaactggttacctggaccttgcttccggcaacagagagtttccaaaacgctggatcaaaacaacaacagcaactttgcctggactggtgccaccaaatatcacctgaacggcagaaactcattggttaatcctggtgtcgccatggcaactcacaaggacgacgaggaccgctttttcccatccagcggagtcctaatttttggaaaaactggagcaactaacaaaactacattggaaaacgtgttaatgacaaatgaagaagaaattcgtcctactaaccctgtggccacagaagaatacgggatagtcagcagcaatttacaagcggctaatactgcagcccagacacaagttgtcaacaaccagggagccttacctggcatggtctggcagaaccgggacgtgtacctgcagggtcccatctgggccaagattcctcacacggatggcaactttcacccgtctcctctcatgggcggctttggacttaaacatcctcctcctcagattctcatcaagaacactcccgttcctgctaatcctccggaggtgtttactcctgccaagtttgcttcgttcatcacacagtacagcaccggacaagtcagcgtggaaatcgagtgggagctgcagaaggagaacagcaagcgctggaacccggagattcagtacacctccaactttgaaaagcagactggtgtggactttgccgttgacagccagggtgtttactctgagcctcgcccaattggcactcgttacctcacccgcaacctgtaa

SEQ ID NO: 230 - DNA, 2190 bp, Adeno-Associated Virus
  source 1..2190: mol_type = other DNA; note = BCD_0189
atggctgccgatggttatcttccagattggctcgaggacaacctctctgagggcattcgcgagtggtgggcgctaaaacctggagccccgaaacccaaagccaaccagcaaaagcaggacgacggccggggtctggtgcttcctggctacaagtacctcggacccttcaacggactcgacaagggggagcccgtcaacgcggcggacgcagcggccctcgagcacgacaaggcctacgaccagcagctcaaagcgggtgacaatccgtacctgcggtataaccacgccgacgccgagtttcaggagcgtctgcaagaagatacgtcatttgggggcaacctcgggcgagcagtcttccaggccaagaagcgggttctcgaacctctcggtctggttgaggaaggcgctaagacggctcctggaaagaagagacccatagactctccagactcctccacgggcatcggcaaaaaaggccagcagcccgctaaaaagaagctcaattttggtcagactggcgactcagagtcagtccccgaccctcaacctctcggagaacctccagcagcgccctctagtgtgggatctggtacaatggctgcaggcggtggcgcaccaatggcagacaataacgaaggtgccgacggagtgggtaatgcctcaggaaattggcattgcgattccacatggctgggcgacagagtcatcaccaccagcaccagaacctgggccctccccacctacaacaaccacctctacaagcaaatctccagcagcagctcaggagccaccaatgacaaccactacttcggctacagcaccccctgggggtattttgactttaacagattccactgccacttctcaccacgtgactggcagcgactcatcaacaacaactggggattccggcccaagaagctgcggttcaagctcttcaacatccaggtcaaggaggtcacgacgaatgacggcgtcacgaccatcgctaataaccttaccagcacggttcaggtcttctcggactcggaataccagctgccgtacgtcctcggctctgcgcaccagggctgcctgcctccgttcccggcggacgtcttcatgattcctcagtacggctacctgactctgaacaacggcagccaatcggtgggccgttcctccttctactgcctggaatatttcccctctcaaatgctgagaacgggcaacaactttgagttcagttacagcttcgaggacgtgcctttccacagcagctacgcgcacagccagagcctggaccggctgatgaaccctctcatcgaccagtacctgtactacctggcccggacccagagcaccacgggttccaccagggaactgcaatttcatcaagctgggcccaatactatggccgagcagtcaaagaactggctgcctggaccctgctataggcaacagagactgtcaaagaacttggactttaacaacaacagcaattttgcctggactgctgccactaaatatcatctgaatggcagaaactctttgaccaatcctggcattcccatggcaaccaacaaggacgatgaggaccagttctttcccatcaacggggtactggtttttggcaagacgggagctgccaacaaaactacgctggaaaacgttctgatgaccagcgaggaggagatcaagaccactaaccctgtggctacagaagaatacggtgtggtctccagcaacctgcagtcgtctacagccgggcctcaatcacagactatcaacagccagggagcactgcctggcatggtctggcagaaccgggacgtgtatctgcagggtcccatctgggccaaaattcctcacacggatggcaactttcacccgtctcctctgatgggcggttttggactcaaacacccgcctccacagatcctgatcaaaaacacacccgtacctgctaatcctccggaggtgtttactcctgccaagtttgcctccttcatcacgcagtacagcaccggacaagtcagcgtggaaatcgagtgggagctgcagaaagaaaacagcaagcgctggaacccagaaattcagtatacttccaattatgccaagtctaataatgttgaatttgctgtgaaccctgatggtgtttatactgagcctcgccccattggcactcgttacctcacccgcaacctgtaa

SEQ ID NO: 231 - DNA, 2220 bp, Adeno-Associated Virus
  source 1..2220: mol_type = other DNA; note = BCD_0190
atggctgccgatggttatcttccagattggctcgaggacaacctctctgagggcattcgcgagtggtgggacttgaaacctggagccccgaaacccaaagccaaccagcaaaagcaggacgacggccggggtctggtgcttcctggctacaagtacctcggacccttcaacggactcgacaagggggagcccgtcaacgcggcggacgcagcggccctcgagcacgacaaggcctacgaccagcagctcaaagcgggtgacaatccgtacctgcggtataaccacgccgacgccgagtttcaggagcgtctgcaagaagatacgtcttttgggggcaacctcgggcgagcagtcttccaggccaagaagcgggttctcgaacctctcggtctggttgaggaaggcgctaagacggctcctggaaagaagcgacctctagaaaagactcccaaccagcccacggacactcaggccgccgggcagactccagccaagaaaaggccacagggcgagcaatctggcgactccgctagacggcagctcgactttgatccacagccagcagcacccctcggacaaccccccgcagccccctctcctgtgggatctaatacaatggcttcaggtggtggcggaccaatggcagacgataaccaaggcgccgacggagtgggtaatgcctcgggaaattggcattgcgattccacatggctgggcgacagagtcatcaccaccagcacccgaacctgggtcctgcccacctacaacaaccacatctacaagcaaatctccagcgagacaggagccaccaacgacaaccactacttcggctacagcaccccctgggggtattttgactttaacagattccactgccacttttcaccacgtgactggcagcgactcatcaacaacaactggggattccggcccaagagactcaactttaaaatcttcaacatccaagtcaaagaagtcacgcagatcgagggcggttcgaccatcgccaataaccttaccagcacgattcaggtctttgcggactcggagtatcagctgccctacgtcctcggatcggctcaccagggctgcctcccgccgttcccggccgatgtcttcatgattcctcagtacggatacctgaccctgaacaacggaagccaatcggtgggacgctcttccttttactgcctggaatactttccctcacaaatgctgagaactggtaacaatttttccttcagctatacttttgaaagcgtgcctttccacagcagctacgcgcacagccagagcctggaccgcatcatgaatccccttgtggaccagtacctgtactacctggccagaactcagacgggtaccggaagcaccaccagcaacacgaggcagctgcagttttaccaggccgggccttccaacatggcggaccaatccagaaactggttgcctgggcccacgtaccggcagcagagggtctccaaaactctggaccaaaacagcaacaccaactttgcctggacggcggctagcaaatacaatttgaatggacgtaaatctttgaccaatcccggaatcgccatggctactcacaaggacgacgaggagcgcttcttccctcagcacggggtcctggtatttggaaaaacaaatgctaccaacaagaccaccctggaaaatgtcctcgttaccagcgaagaggaaattaaagcgaccaatccggtggcgacagaggagtacgggactgtttccagcaacctgcaatcaaacacaacgaatccaaccacagagtctgtcaacaaccagggagtacttcctggaatggtttggcaagaccgggacgtgtacctgcagggtcccatctgggccaaaattcctcatacggatggacactttcacccctctcctcttatgggcggctttggactgaaacacccgcctccccagattctcatcaaaaacacgcccgtacctgcgaatcctccagagacttttaccacctccaagtttgccagctacatcacccagtacagcaccggacaggtcagcgtagaaatagaatgggagctgcaaaaggaaaacagcaagcgctggaatcccgagatccagtatacttccaactacgcgaaatccaacaatgtggagttctccgtggacgcagccggtgtttattctgaaccccgccctataggtactcgttacctcacccgcaacctgtaa

SEQ ID NO: 232 - DNA, 2220 bp, Adeno-Associated Virus
  source 1..2220: mol_type = other DNA; note = BCD_0192
atggctgccgatggttatcttccagattggctcgaggacaacctctctgagggcattcgcgagtggtgggacttgaaacctggagccccgaaacccaaagccaaccagcaaaagcaggacgacggccggggtctggtgcttcctggctacaagtacctcggacccttcaacggactcgacaagggggagcccgtcaacgcggcggacgcagcggccctcgagcacgacaaggcctacgaccagcagctcaaagcgggtgacaatccgtacctgcggtataaccacgccgacgccgagtttcaggagcgtctgcaagaagatacgtcttttgggggcaacctcgggcgagcagtcttccaggccaagaagcgggttctcgaacctctcggtctggttgaggaaggcgctaagacggctcctggaaagaagcgacctctagaaaagactcccaaccagcccacggacactcaggccgccgggcagactccagccaagaaaaggccacagggcgagcaatctggcgactccgctagacggcagctcgactttgatccacagccagcagcacccctcggacaaccccccgcagccccctctcctgtgggatctaatacaatggcttcaggtggtggcggaccaatggcagacgataaccaaggcgccgacggagtgggtaatgcctcgggaaattggcattgcgattccacatggctgggcgacagagtcatcaccaccagcacccgaacctgggtcctgcccacctacaacaaccacatctacaagcaaatctccagcgagacaggagccaccaacgacaaccactacttcggctacagcaccccctgggggtattttgactttaacagattccactgccacttttcaccacgtgactggcagcgactcatcaacaacaactggggattccggcccaagagactcaactttaaaatcttcaacatccaagtcaaagaagtcacgcagatcgagggcggttcgaccatcgccaataaccttaccagcacgattcaggtctttgcggactcggagtatcagctgccctacgtcctcggatcggctcaccagggctgcctcccgccgttcccggccgatgtcttcatgattcctcagtacggatacctgaccctgaacaacggaagccaatcggtgggacgctcttccttttactgcctggaatactttccctcacaaatgctgagaactggtaacaatttttccttcagctatacttttgaaagcgtgcctttccacagcagctacgcgcacagccagagcctggaccgcatcatgaatccccttgtggaccagtacctgtactacctggccagaactcagacgggtaccggaagcaccaccagcaacgcgaggcagctgcagttttaccaggccgggccttccaacatggcggaccaatccagaaactggttgcctgggcccacgtaccggcagcagagggtctccaaaactctggaccaaaacagcaacaccaactttgcctggacggcggctagcaaatacaatttgaatggacgtaaatctttgaccaatcccggaatcgccatggctactcacaaggacgacgaggagcgcttcttccctcagcacggggtcctggtatttggaaaaacaaatgctaccaacaagaccaccctggaaaatgtcctcgttaccagcgaagaggaaattaaagcgaccaatccggtggcgacagaggagtacgggactgtttccagcaacctgcaatcaaacacaacgaatccaaccacagagtctgtcaacaaccagggagtacttcctggaatggtttggcaagaccgggacgtgtacctgcagggtcccatctgggccaaaattcctcatacggatggacactttcacccctctcctcttatgggcggctttggactgaaacacccgcctccccagattctcatcaaaaacacgcccgtacctgcgaatcctccagagacttttaccacctccaagtttgccagctacatcacccagtacagcaccggacaggtcagcgtagaaatagaatgggagctgcaaaaggaaaacagcaagcgctggaatcccgagatccagtatacttccaactacgcgaaatccaacaatgtggagttctccgtggacgcagccggtgtttattctgaaccccgccctataggtactcgttacctcacccgcaacctgtaa

SEQ ID NO: 233 - DNA, 2204 bp, Adeno-Associated Virus
  source 1..2204: mol_type = other DNA; note = BCD_0193
atggctgctgacggttatcttccagattggctcgaggacaacctctctgagggcattcgcgagtggtgggacctgaaacctggagccccgaagcccaaggccaaccagcagaaacaggaccacggccggggtctggtgcttcctggctacaagtacctcggacccttcaacggactcgacaaaggggagcccgtcaacgaggcggacgccgcggccctcgagcacgacaaggcctacgaccagcagctcaaagcgggtgacaatccgtacctgcggtataaccacgccgacgccgagtttcaggagcgtctgcaagaagatacgtcttttgggggcaacctcgggcgagcagtcttccaggccaaaaagaggatactcgagcctctcggtctggttgaggaaggcgctaagacggctcctggaaaaaagagaccggtagagcagtcaccccaagaaccggactcctcctcgggcatcggcaagacaggccagcagcccgctaaaaagagactcaactttggtcagactggcgactcagagtcagttcccgaccctcaaccaatcggagaacctccagcagccccctcaggtctgggatctaatacaatggcttcaggcggtggcgctccaatggcagacaataacgaaggcgccgacggagtgggtaattcctcgggaaattggcattgcgattccacatggctgggggacagagtcatcaccaccagcacccgaacctgggcattgcccacctacaacaaccacctctacaagcaaatctccaacggcacctcgggaggcagcaccaacgacaacacctatttcggctacagcaccccctgggggtattttgacttcaacagattccactgccacttctcaccacgtgactggcagagactcatcaacaacaactggggattccggcccaagaagctcaactttaagctgttcaacatccaggtcaaggaggtcacgacgaacgaaggcaccaagaccatcgccaataacctcaccagcaccgtgcaggtctttacggactcggagtatcagctaccgtacgtgctaggctctgcacatcaaggatgcctgcctccgttcccggcagatgtgttcatggttccccagtacggctacctgactctaaacaatggaagtcaggcactggggcgatcctccttctactgcctggagtactttccatcgcagatgctcaggactggcaacaactttcagttcagctataccttcgaggacgtgcccttccacagcagctacgcgcacagccagagcctggaccggctgatgaacccgctgattgaccagtatctgtactacctggtcaggactcaaaccactggcaccggtggaactcaaactctggcattcagccaaggagggcctagcactatggccaaccaggctagaaactgggtacccgggccttgctatcggcagcagcgcgtttctacaactcagaaccaaaacaacaacagcaactttgcttggactggagctgctaaattcaagctgaatggccgggactctctgatgaatcctggggtggccatggcttcacacaaagatgatgaagaccgcttcttcccgtcgagcggagtgctgatttttggcaaacagggagccaacaaagacggagcagactacagtcaggtgctgattacagatgaagaagaaattaaagctaccaaccccgtggccacagaagaatacggagttgtagccatcaaccagcaaaatgccaacacgcaggcgcagaccggagctgtgcacaaccagggagtaattcctggcatggtatggcaaaaccgggacgtgtacctgcagggtcccatctgggccaaaattcctcatacggacggcaactttcacccgtctcctctaatgggcggatttggacttaaacacccgcctcctcagatcctgatcaaaaacactcccgtgccggcagatcccccgcttaccttcactgaagccaagctgaactctttcatcacgcagtacagcaccggccaggtcagcgtggaaattgagtgggagctgcagaaggagaacagcaaacggtggaatccagagattcagtacacttccaactactacaaatctacaagtgtggactttgctgtcaatacagaaggtgtatatagtgaaccccgccccattggcactcgttacctcacccgtaa

SEQ ID NO: 234 - DNA, 2193 bp, Adeno-Associated Virus
  source 1..2193: mol_type = other DNA; note = BCD_0194
atggctgccgatggttatcttccagattggctcgaggacaacctctctgagggcattcgcgagtggtgggcgctgaaacctggagccccgcagcccaaggcgaaccagcaaaagcaggacgacggccggggtctggtgcttcctggctacaagtacctcggacccttcaacggactcgacaagggggagcccgtcaacgaggcggacgccgcggccctcgagcacgacaaggcctacgaccagcagctcaaagcgggtgacaatccgtacctgcggtataaccacgccgacgccgagtttcaggagcgtcttcaagaagatacgtctttcgggggcaacctcgggcgagcagtcttccaggccaagaagcgggttctcgaacctctgggcctggtcgaggaggcagctaagacggctcctggaaaaaagagaccggtagactctccagactctacctcgggcatcggcaagaaaggccagcagcccgccagaaagagactcaattttgggcagactggcgacgcagagtcagtgcccgaccctcaacccatcggagaacctccagcagcgccctctggtctgggatctggtacaatggctgcaggtggtggcgcaccaatggcagacaataacgagggtgccgacggagtgggtaatgcctcaggaaattggcattgcgattccacatggctgggcaacagagtcattaccaccagcacccgcacctgggccctgcccacctacaacaaccacctctacaagcaaatctccagcagcagctcaggagccaccaatgacaaccactacttcggctacagcaccccctgggggtattttgacttcaacagattccactgccacttctccccacgtgactggcagcgactcatcaacaacaactggggattccggcccaagagactccgattcaagctcttcaacatccaagtcaaggaggtcacgacgaatgacggcgttacgaccatcgctaataaccttaccagcacggttcaggtcttctcggactcggaataccagctcccgtacgtgctcggctcggcgcaccagggctgcctgcctccgttcccggcggacgtcttcatgattcctcaatacggctacctgactctgaacaatggcagtcagtctgtaggccgctcctccttctactgcctggagtactttccgtctcagatgctgagaacgggtaacaactttgaattcagctacgagtttgaggacgtgcccttccacagcagctacgcgcacagccagagcctggaccggctgatgaaccctctcatcgaccagtatctgtactacttggcccggactcagagcagcaccggaacctccacacgggaactgcaatttcatcaggctggaccagctactatggcagaacagtctaaaaactggttacctggtccctgcttcagacaacagcgcatttcaaaaacaacagataataacaacaacagcaactttgcttggactggtgctaccaaatatcacctaaacggaagaaattcattgactaacccaggagtacccatggctactcacaaggatgatgaaagtgtcttcttcccaattaatggagttctggtgtttggaaagactggagcttccaataaaaccacattggaaaacgtgctaatgacagatgaagaagaaattaaagctacaaatccagtggctacagaagaatatggtgtggtttctagcaacattcagtctcaaaatagcaacccaactacacagactgtcaacaaccagggggccttacctggcatggtgtggcagaaccgggacgtgtacctgcagggtccgatttgggccaagattcctcacacggacggcaactttcatccttcgccgctgatgggaggctttggactgaaacatccgcctcctcagatcctgatcaaaaacacgccggttcccgcgaatcctccagagacttttacaccagccaagtttgcctcgttcatcacgcagtacagcaccggacaggtcagcgtggaaattgaatgggagctgcagaaggagaacagcaagcgctggaacccagagatccagtatacttccaactacgacaagcagactggtgtggactttgctgtggacactcagggtgtttattcagagcctcgccccattggcactcgttacctcacccgcaacctgtaa

SEQ ID NO: 235 - DNA, 2211 bp, Adeno-Associated Virus
  source 1..2211: mol_type = other DNA; note = BCD_0195
atggctgctgacggttatcttccagattggctcgaggacaacctctctgagggcattcgcgagtggtgggacctgaaacctggagccccgaagcccaaggccaaccagcagaaacaggaccacggccggggtctggtgcttcctggctacaagtacctcggacccttcaacggactcgacaagggggagcccgtcaacgaggcggacgccgcggccctcgagcacgacaaggcctacgaccagcagctcaaagcgggtgacaatccgtacctgcggtataaccacgccgacgccgagtttcaggagcgtcttaaagaagatacgtcttttgggggcaacctcgggcgagcagtcttccaggccaaaaagaggatactcgagcctctcggtctggttgaggaaggcgctaagacggctcctggaaaaaagagaccggtagagcagtcaccccaagaaccggactcctcctcgggcatcggcaagacaggccagcagcccgctaaaaagaagttcaactttggtcagactggcgacccagagtcagttcccgaccctcaaccaatcggagaacctccagcagccccctcaggtctgggatctaatacaatggcttcaggcggtggcgctccaatggcagacaataacgaaggcgccgacggagtgggtaattcctcgggaaattggcattgcgattccacatggctgggggacagagtcatcaccaccagcacccgaacctgggccctgcccacctacaacaaccacctctacaagcaaatctccaacggcacctcgggaggcagcaccaacgacaacacctatttcggctacagcaccccctgggggtattttgacttcaacagattccactgccacttctcaccacgtgactggcagcgactcatcaacaacaactggggattccggcccaagaagctcaactttaagctgttcaacatccaggtcaaggaggtcacgacgaacgaaggcaccaagaccatcgccaataacctcaccagcaccgtgcaggtctttacggactcggagtatcagctaccgtacgtgctaggctctgcacatcaaggatgcctgcctccgttcccggcagacgtctttatggttccccagtacggctacctgactttaaacaatggaagtcaggcactggggcgatcctccttctactgcctggagtactttccatcgcagatgctcaggactggcaacaactttcagttcagctacaccttcgaggacgtgcccttccacagcagctacgcgcacagccagagcctggaccggctgatgaacccgctgattgaccagtacctgtactatctggtcaggactcaaaccactggcaccggtggaactcaaactctggcattcagccaaggagggcccagcactatggccaatcaggcgagaaactgggtacccgggccttgctatcggcagcagcgcgtttccacaactcagaaccaaaacaacaacagcaactttgcttggactggagctgctaaattcaagctgaatggccgtgactctctgatgaatcctggggtggccatggcttcacacaaagatgatgaagaccgcttcttcccgtccagcggagtgctgatttttggcaaacagggagccaacaaagacggagcagactacagtcaggtgctgattacagatgaagaagaaattaaggctactaacccggtagccacagaagaatacggagttgtagccatcaaccagcaaaatgccaacacgcaggcgcagaccggagctgtgcacaaccagggagtaattcctggcatggtctggcaaaaccgggacgtgtacctgcagggtcccatctgggccaaaattcctcacacggacggcaactttcacccgtctcctctcatgggcggatttggactgaagcacccgcctcctcagatcctgatcaaaaacactcccgtgccggcagatcccccgcttaccttcactgaagccaagctgaactctttcatcacgcagtacagcaccggccaagtcagcgtggaaattgagtgggagctgcagaaggagaacagcaagcggtggaatccagagattcagtacacttccaactactacaaatctacaagtgtggactttgctgtcaatacagaaggcgtatatagtgaaccccgccccattggcactcgttacctcacccgcaacctgtaa

SEQ ID NO: 236 - DNA, 2202 bp, Adeno-Associated Virus
  source 1..2202: mol_type = other DNA; note = BCD_0196
atggctgctgacggttatcttccagattggctcgaggacaacctctctgagggcattcgcgagtggtgggacctgaaacctggagccccgaagcccaaggccaaccagcagaaacaggaccacggccggggtctggtgcttcctggctacaagtacctcggacccttcaacggactcgacaagggggagcccgtcaacgaggcggacgccgcggccctcgagcacgacaaggcctacgaccagcagctcaaagcgggtgacaatccgtacctgcggtataaccacgccgacgccgagtttcaggagcgtcttaaagaagatacgtcttttgggggcaacctcgggcgagcagtcttccaggccaaaaagaggatactcgagcctctcggtctggttgaggaaggcgctaagacggctcctggaaaaaagagaccggtagagcagtcaccccaagaaccggactcctcctcgggcatcggcaagacaggccagcagcccgctaaaaagaagctcaactttggtcagactggcgacccagagtcagttcccgaccctcaaccaatcggagaaccacccgcaggtccctcaggtctgggatctggtacaatggctgcaggcggtggcgcaccaatggcagacaataacgaaggtgccgacggagtgggtaatgcctccggaaattggcattgcgattccacatggctgggcgacagagtcatcaccaccagcacccgaacctgggcattgcccacctacaacaaccacctgtacaagcaaatctccagcagcagctcaggggcaacaaatgacaaccactacttcggctacagcaccccctgggggtattttgacttcaacagattccactgccacttctcaccacgtgactggcagcgactcatcaacaacaactggggattccggcccaagaagctcaacttcaagctgttcaacatccaggtcaaggaggtcacgacgaatgacggcgtcacgaccatcgccaataaccttaccagcacggttcaggtcttttcggactcggagtaccagctaccgtacgtcctcggctcggctcaccagggctgcttgcctccgttcccggcagacgtcttcatgatcccgcaatacggctacttgactttaaacaacgggagccagtcggtaggccgttcctccttctactgcctggagtattttccatctcagatgctcaggactggtaacaactttaccttcagctacacctttgaagacgtgcctttccacagcagctatgcgcacagccagagcctggaccggctgatgaatccccttattgaccagtacttgtactacctggccaggacccagagcaccacggggtctacaagagaactgcagtttcatcaggctgggccaaacactatggccgagcagtcaaagaactggttacctgggccttgcttccggcaacagcggctatcaaagaacttggactttaataacaacagcaactttgcctggacagctgccacaaagtaccacctcaatggacggaactctctgactaatcccggtgttgctatggcaaccaataaggatgacgaggaccagttctttcccataaatggcgtcctggtctttgggaaaacaggagcttctaacaagacaacgctagaaaacgtgctaatgactagcgaagaagaaattaaaaccacaaatcctgtagccacagaagagtacggctacgtaagcagcaacttgcagtcaagcacggcaggccctcaatcacaaactgtaaacaatcagggtgccttacctggaatggtctggcagaacagagacgtgtacctgcagggtcccatttgggccaagattcctcatacggacggcaactttcacccgtctcctcttatgggcggatttggactgaagcacccgcctccacagattctgatcaaaaacacacctgttcctgctaatcctccagaagtgtttactccttccaagtttgcctctttcatcacacaatacagcaccggccaggtcagcgtggaaatcgagtgggagctgcagaaggaaaacagcaagaggtggaatcctgaaatccagtatacatccaactatgctaagtctaataatgtggagtttgctgtcaatacagaaggtgtttatactgaacctcgccccattggcactcgttacctcacccgcaacctgtaa

SEQ ID NO: 237 - DNA, 2217 bp, Adeno-Associated Virus
  source 1..2217: mol_type = other DNA; note = BCD_0197
atggctgctgacggttatcttccagattggctcgaggacaacctctctaagggcattcgcgagtggtgggacctgaaacctggagccccgaaacccaaagccaaccagcaaaagcaggacaacggccggggtctggtgcttcctggctacaagtacctcggacccttcaacggactcgacaagggggagcccgtcaacgcggcggacgcagcggccctcgagcacgacaaggcctacgaccagcagctcaaagcgggtgacaatccgtacctgcggtataatcacgccgacgccgagtttcaggagcgtctgcaagaagatacgtcttttgggggcaacctcgggcgcgcagtcttccaggccaaaaagcgggttctcgaacctctgggcctggttgaatcgccggttaagacggcacctggaaagaagagaccggtagagccatcaccccagcgctctccagactcctccacgggcatcggcaagaaaggccagcagcccgcgaaaaagagactcaattttgggcagactggcgactcagagtcagtccccgaccctcaaccaatcggagaaccaccagcaggcccctctggtctgggatctggtacaatggctgcaggcggtggcgctccaatggcagacaataacgaaggcgccgacggagtgggtagttcctcaggaaattggcattgcgattccacatggctgggcgacagagtcatcaccaccagcacccgaacctgggccctccccacctacaacaaccacctctacaagcaaatctccaacgggacctctggaggaagcaccaacgacaacacctacttcggctacagcaccccctgggggtattttgacttcaacagattccactgccacttttcaccacgtgactggcagcgactcatcaacaacaactggggattccggcccaagagactcaacttcaagctcttcaacatccaagtcaaggaggtcacgcagaatgaaggcaccaagaccatcgccaataaccttaccagcacgattcaggtctttacggactcggaataccagctcccgtacgtgctcggctcggcgcaccagggctgcctgcctccgttcccggcggacgtcttcatgattccccagtacgggtacctgactctgaacaatggcagccaggctgtgggccggtcgtccttctactgcctggaatactttccttctcaaatgctgagaacgggcaacaactttgaattcagctacaacttcgaggacgtgcccttccacagcagctacgcgcacagccagagcctggaccggctgatgaaccctctcatcgaccagtacttgtactacctgtcccggactcaaagcacgggcggtactgcaggaactcagcagttgctattttctcaggccgggcctaataacatgtcggctcaggccaagaactggctacccgggccctgctaccggcagcaacgcgtctccacgacactgtcgcaaaacaacaacagtaactttgcctggacgggtgccaccaagtatcatctgaatggcagagactctctggtgaatcctggcgttgccatggctacccacaaggacgacgaggagcgattttttccatccagcggagtcttgatgtttgggaaacagggagctggaaaagacaacgtggactatagcagcgtgatgctcaccagcgaggaagaaatcaagaccaccaaccctgtagccacagaacagtacggcgtggtggccgataacctgcaacaacaaaacgccgctcctattgtaggggccgtcaacagtcaaggagccttacctggcatggtttggcagaaccgggacgtgtacctgcagggtcccatctgggccaaaattcctcacacggacggcaactttcatccctcgccgctgatgggaggctttggactgaaacacccgcctcctcagatcctgatcaaaaacacacctgttcccgcggatcctccgaccaccttcaatcaggccaagctggcttctttcatcacgcagtacagtaccggccaagttagcgtggaaatcgagtgggagctgcagaaggagaacagcaagcgctggaacccagaaattcagtacacctccaactactacaaatctacaaatgtggactttgctgtcaatactgagggtacttattctgagcctcgccccattggcactcgttacctcacccgtaatctgtaa

SEQ ID NO: 238 - DNA, 2196 bp, Adeno-Associated Virus
  source 1..2196: mol_type = other DNA; note = BCD_0198
atggctgctgacggttatcttccagattggctcgaggacaacctctctgagggcattcgcgagtggtgggcgctgaaacctggagccccgcaacccaaagccaaccagcaaaagcaggacgacggccggggtctggtgcttcctggctacaagtacctcggacccttcaacggactcgacaagggggagcccgtcaacgaggcggacgccgcggccctcgagcacgaccgggcctacgaccagcagctgcaagcgggtgacaatccgtacctgcggtataaccacgccgacgccgagtttcaggagcgtctgcaagaagatacgtcctttgggggcaacctcgggcgagcagtcttccaggccaaaaagagggtactcgagcctctgggtctggttgaggaaggcgctaagacggctcctggaaagaagcggccagtagaaccggactccagctcgggcatcggcaagacaggccagcagcccgcgaaaaagagactgaattttgggcagactggcgacgcagagtcagtgcccgacccccaacctctctcagaaccacccgcaggtccctctggtctgggatctggtacaatggctgcaggcggtggcgctccaatggcagacaataacgaaggcgccgacggagtgggtaatgcctcaggaaattggcattgcgattccacatggctgggcgaccgagtcatcaccaccagcactcggacctgggccctccccacctacaacaaccacctctacaagcaaatctccaacggaacctcgggaggcagcagcaacgacaacacctatttcggctacagcaccccctgggggtattttgatttcaacagattccactgccacttttcaccacgtgactggcagcgactcatcaacaacaactggggattccggcccaagaagctcaacttcaagctcttcaacatccaggtcaaggaggtcacccagaatgaaggcaccaagaccatcgccaataacctcaccagcacggtgcaggtctttacggactcggagtaccagctcccgtacgtgctcggctctgcccaccagggctgcctgcccccgttcccggcggacgtgttcatgattccgcagtacgggtacctgacgctcaacaacgggagccaggccgtgggccgttcctccttctactgcctggagtactttccctcgcaaatgctgagaacgggcaacaactttaccttcagctacacctttgaggacgtgcccttccacagcagctacgcgcacagccagagcctggaccggctgatgaaccctctcatcgaccagtacctgtactacctgtctcggactcagaccaacgggaccaatgccacgcagactctgctgtttgctcaggccgggcctcagaacatgtcggctcaggccaagaactggctgcctggtccctgctatcggcagcagcgcgtgtctacgacagtgtcgcaaaacaacaacagcaactttacctggaccggggcgaccaagtaccacctgaacggccgagactccctggtgaaccccggtgtcgccatggccacgcacaaggacgacgaggagcgcttcttcccgagcagcggggtcctgatgtttggcaagcagggcgctggaaaggacaatgtcgagtaccagaacgtgatgctcaccagcgaggaggagatcaagaccaccaacccggtggccacggagcagtacggagtggtggcggacaatctgcagcagaccaactcggctcctattgtgggggcagtcaatagccagggggccttacctggcatggtctggcaaaaccgagacgtgtacctgcagggtcccatctgggccaagatcccgcacacggacggcaactttcacccgtctcctctcatgggcggctttggactgaagcacccgcctccccagatcctgatcaagaacacgccggtacctgcggatcccccggtgaactttacggacgctaagctggccagtttcatcacgcagtacagcaccgggcaggtcagcgtggagattgagtgggagctgcagaaagaaaacagcaagcgctggaatcccgagattcagtacacttccaattattataaatcagctaatgtggactttgccgtcaatgcagatggtgtatatagtgaaccccgccctattggcactcgttacctcacccgtaatctgtaa

SEQ ID NO: 239 - DNA, 2220 bp, Adeno-Associated Virus
  source 1..2220: mol_type = other DNA; note = BCD_0274
atggctgctgacggttatcttccagattggctcgaggacaacctctctgaaggcatccgcgagtggtgggcgctgaaacctggagccccacaacccaaagcgaatcaacaacatcaggacgacagcaggggtcttgtgcttcctgggtacaagtacctcggacccttcaacggactcgacaagggagagccggtcaacgaggcagacgccgcggccctcgagcacgacaaggcctacgacaagcagctcgagcagggggacaacccgtacctcaagtacaaccacgcggacgccgagtttcaggagcgtcttcaagaagatacgtcttttgggggcaacctcgggcgagcagtcttccaggccaaaaagaggattctcgaacctctgggtctggttgaggaagcggctaagacggctcctggaaagaagcgacctctagagaaaacccccaaccagcccacggacactcaggccgccgggcagactccagccaaaaaaaggccacagggcgagcaatctggcgactccgctagacgacagctcgactttgatccacaaccagcagctcccatcggacaaccccccgcagccccctctcctgtgggatctaatacaatggcttcaggtggtggcggaccaatggcagacgataaccaaggcgccgacggagtgggtaatgcctcgggaaattggcattgcgattccacatggctgggcgacagagtcatcaccaccagcacccgaacctgggtcctgcccacctacaacaaccgcatctacaagcaaatctccagcgaatcgggagccaccaacgacaaccactacttcggctacagcaccccctgggggtattttgacttcaacagattccactgccacttctcaccacgtgactggcagcgactcatcaacaacaactggggattccgacccaagcgactcaactccaagatcttcaacatccaggtcaaagaggtcacgcagatcgagggcggctcgaccatcgccaataaccttaccagcacgattcaggtctttgcggattcggagtaccagctgccctgcgtcctcggatcggctcaccagggctgcctcccgccgttcccggccgatgtcttcatgattccccagtacggatacctgactctgaacaacggcagccaatcagtgggacgttcttccttttactgcctggaatatttcccatcccagatgctgagaactggaaacaactttcaattcagctatacctttgaaagcgtgcctttccacagcagctacgcgcacagccagagcctggaccgcatcatgaaccccctggtggaccagtacctgtactacctggccagaactcagacgggtaccggaagcaccaccagcaacacgcggcagctgcagttttaccaggccgggcctcccaacatggctgaccaatccaggaactggttgcctgggcccatgtaccggcagcagcgggtctccaagactctggaccaaaacagcaacaccaattttgcctggacggctgccagcaaatacaacctgaatggacgcaaatcattggctaatcctggtattgccatggcgactcacaaggacgatgaggagcgcttcttccctcagcacggggttctggtgtttggacagacaaatgctaccaacaagacaactttggacaatgttttaattactagtgaagaagaaattaaggctactaacccggtagctacagaggagtacgggactgtttctagcaacctgcaatccggttccaccaaccccaccacagaatctgtcaacaaccagggaatactgcctggtatggtctggcaggaccgggacgtgtacctgcagggtcccatttgggccaagattcctcacacggacggacattttcacccgtctcccctgatgggcggctttggactgaagcacccgcctccccaaattctcatcaaaaacaccccggtacctgcgaatcctccagagacttttaccacttccaagtttgccagctacatcacgcagtacagcaccgggcaggtcagcgtggaaattgaatgggagctgcagaaggaaaacagcaagcgctggaacccagagattcagtatacttccaactacgcgaaatccaacaatgttgagttctccgtggatgcagccggtgtttattctgaaccccgccctattggtactcgttacctcacccgtaatctgtaa

SEQ ID NO: 240 - DNA, 2220 bp, Adeno-Associated Virus
  source 1..2220: mol_type = other DNA; note = BCD_0275
atggctgctgacggttatcttccagattggctcgaggacaacctctctgaaggcatccgcgagtggtgggcgctgaaacctggagcccccaagcctaaagcgaatcaacaacatcaggacaacagcaggggtcttgtgcttcctgggtacaagtacctcggacccttcaacggactcgacaagggagagccggtcaacgaggcggacgccgcggccctcgagcacgacaaggcctacgacaagcagctcgagcagggggacaacccgtacctcaagtacaaccacgcggacgccgagtttcgggagcgtcttcaagaagatacgtcttttgggggcaacctcgggcgagcagtcttccaggccaaaaagaggattctcgagcctctgggtctggttgaggaagcggctaagacggctcctggaaagaagcgacctctagagaaaacccccaaccagcccacggacactcaggccgccgggcagactccagccaaaaaaaggccacagggcgagcaatctggcgactccgctagacgacagctcgactttgatccacaaccagcagctcccatcggacaaccccccgcagccccctctcctgtgggatctaatacaatggcttcaggtggtggcggaccaatggcagacgataaccaaggcgccgacggagtgggtaatgcctcgggaaattggcattgcgattccacatggctgggcgacagagtcatcaccaccagcacccgaacctgggtcctgcccacctacaacaaccacatctacaagcaaatctccagcgaatcgggagccaccaacgacaaccactacttcggctacagcaccccctgggggtattttgacttcaacagattccactgccacttctcaccacgtgactggcagcgactcatcaacaacaactggggattccgacccaagcgactcaacttcaagatcttcaacatccaggtcaaagaagtcacgcagatcgagggcggctcgaccatcgccaataaccttaccagcacgattcaggtctttgcggattcggagtaccagctgccctacgtcctcggatcggctcaccagggctgcctcccgccgttcccggccgatgtcttcatgattccccagtacggatacctgactctgaacaacggcagccaatcagtgggacgttcttccttttactgcctggaatatttcccatcccagatgctgagaactggaaacaactttcaattcagctatacctttgaaagcgtgcctttccacagcagctacgcgcacagccagagcctggaccgcatcatgaaccccctggtggaccagtacctgtactacctggccagaactcagacgggtaccggaagcaccaccagcaacacgcggcagctgcagttttaccaggccgggccttccaacatggctgaccaatccaggaactggttgcctgggcccatgtaccggcagcagcgggtctccaagactctggaccaaaacagcaacaccaactttgcctggacggctgccagcaaatacaacctgaatggacgcaaatcattggctaatcctggtattgccatggcgactcacaaggacgatgaggagcgcttcttccctcagcacggggttctggtgtttggacagacaaatgctaccaacaagacaactttggacaatgttttaattactagtgaagaagaaattaaggctactaacccggtagctacagaggagtacgggactgtttctagcaacctgcaatccggttccaccaaccccaccacagaatctgtcaacaaccagggaatactgcctggtatggtctggcaggaccgggacgtgtacctgcagggtcccatttgggccaagattcctcacacggacggacattttcacccgtctcccctgatgggcggctttggactgaagcacccgcctccccaaattctcatcaaaaacaccccggtacctgcgaatcctccagagacttttaccacttccaagtttgccagctacatcacgcagtacagcaccgggcaggtcagcgtggaaattgaatgggagctgcagaaggaaaacagcaagcgctggaacccagagattcagtatacttccaactacgcgaaatccaacaatgttgagttctccgtggatgcagccggtgtttattctgaaccccgccctattggtactcgttacctcacccgtaatctgtaa

SEQ ID NO: 241 - DNA, 2220 bp, Adeno-Associated Virus
  source 1..2220: mol_type = other DNA; note = BCD_0276
atggctgctgacggttatcttccagattggctcgaggacaacctctctgaaggcatccgcgagtggtgggcgctgaaacctggagcccccaagcctaaagcgaatcaacaacatcaggacaacagcaggggtcttgtgcttcctgggtacaagtacctcggacccttcaacggactcgacaagggagagccggtcaacgaggcggacgccgcggccctcgagcacgacaaggcctacgacaagcagctcgagcagggggacaacccgtacctcaagtacaaccacgcggacgccgagtttcaggagcgtcttcaagaagatacgtcttttgggggcaacctcgggcgagcagtcttccaggccaaaaagaggattctcgagcctctgggtctggttgaggaagcggctaagacggctcctggaaagaagcgacctctagagaaaacccccaaccagcccacggacactcaggccgccgggcagactccagccaaaaaaaggccacagggcgagcaatctggcgactccgctagacgacagctcgactttgatccacaaccagcagctcccatcggaccaccccccgcagccccctctcctgtgggatctaatacaatggcttcaggtggtggcggaccaatggcagacgataaccaaggcgccgacggagtgggtaatgcctcgggaaattggcattgcgattccacatggctgggcgacagagtcatcaccaccagcacccgaacctgggtcctgcccacctacaacaaccacatctacaagcaaatctccagcgaatcgggagccaccaacgacaaccactacttcggctacagcaccccctgggggtattttgacttcaacagattccactgccacttctcaccacgtgactggcagcgactcatcaacaacaactggggattccgacccaagcgactcaacttcaagatcttcaacatccaggtcaaagaagtcacgcagatcgagggcggctcgaccatcgccaataaccttaccagcacgattcaggtctttgcggattcggagtaccagctgccctacgtcctcggatcggctcaccagggctgcctcccgccgttcccggccgatgtcttcatgattccccagtacggatacctgactctgaacaacggcagccaatcagtgggacgttcttccttttactgcctggaatatttcccatcccagatgctgagaactggaaacaactttcaattcagctatacctttgaaagcgtgcctttccacagcagctacgcgcacagccagagcctggaccgcatcatgaaccccctggtggaccagtacctgtactacctggccagaactcagacgggtaccggaagcaccaccagcaacacgcggcagctgcagttttaccaggccgggccttccaacatggctgaccaatccaggaactggttgcctgggcccatgtaccggcagcagcgggtctccaagactctggaccaaaacagcaacaccaactttgcctggacggctgccagcaaatacaacctgaatggacgcaaatcattggctaatcctggtattgccatggcgactcacaaggacgatgaggagcgcttcttccctcagcacggggttctggtgtttggacagacaaatgctaccaacaagacaactttggacaatgttttaattactagtgaagaagaaattaaggctactaacccggtagctacagaggagtacgggactgtttctagcaacctgcaatccggttccaccaaccccaccacagaatctgtcaacaaccagggaatactgcctggtatggtctggcaggaccgggacgtgtacctgcagggtcccatttgggccaagattcctcacacggacggacattttcacccgtctcccctgatgggcggctttggactgaagcacccgcctccccaaattctcatcaaaaacaccccggtacctgcgaatcctccagagacttttaccactcccaagtttgccagctacatcacgcagtacagcaccgggcaggtcagcgtggaaattgaatgggagctgcagaaggaaaacagcaagcgctggaacccagagattcagtatacttccaactacgcgaaatccaacaatgttgagttctccgtggatgcagccggtgtttattctgaaccccgccctattggtactcgttacctcacccgtaatctgtaa

SEQ ID NO: 242 - DNA, 2220 bp, Adeno-Associated Virus
  source 1..2220: mol_type = other DNA; note = BCD_0277
atggctgctgacggttatcttccagattggctcgaggacaacctctctgaaggcatccgcgagtggtgggcgctgaaacctggagcccccaagcctaaagcgaatcaacaacatcaggacaacagcaggggtcttgtgcttcctgggtacaagtacctcggacccttcaacggactcgacaagggagagccggtcaacgaggcggacgccgcggccctcgagcacgacaaggcctacgacaagcagctcgagcagggggacaacccgtacctcaagtacaaccacgcggacgccgagtttcaggagcgtcttcaagaagatacgtcttttgggggcaacctcgggcgagcagtcttccaggccaaaaagaggattctcgagcctctgggtctggttgaggaagcggctaagacggctcctggaaagaagcgacctctagagaaaacccccaaccagcccacggacactcaggccgccgggcagactccagccaaaaaaaggccacagggcgagcaatctggcgactccgctagacgacagctcgactttgatccacaaccagcagctcccatcggacaaccccccgcagccccctctcctgtgggatctaatacaatggcttcaggtggtggcggaccaatggcagacgataaccaaggcgccgacggagtgggtaatgcctcgggaaattggcattgcgattccacatggctgggcgacagagtcatcaccaccagcacccgaacctgggtcctgcccacctacaacaaccacatctacaagcaaatctccagcgaatcgggagccaccaacgacaaccactacttcggctacagcaccccctgggggtattttgacttcaacagattccactgccacttctcaccacgtgactggcagcgactcatcaacaacaactggggattccgacccaagcgactcaacttcaagatcttcaacatccaggtcaaagaagtcacgcagatcgagggcggctcgaccatcgccaataaccttaccagcacgattcaggtctttgcggattcggagtaccagctgccctacgtcctcggatcggctcaccagggctgcctcccgccgttcccggccgatgtcttcatgattccccagtacggatacctgactctgaacaacggcagccaatcagtgggacgttcttccttttactgcctggaatatttcccatcccagatgctgagaactggaaacaactttcaattcagctatacctttgaaagcgtgcctttccacagcagctacgcgcacagccagagcctggaccgcatcatgaaccccctggtggaccagtacctgtactacctggccagaactcagacgggtaccggaagcaccaccagcaacacgcggcagctgcagttttaccaggccgggccttccaacatggctgaccaatccaggaactggttgcctgggcccatgtaccggcagcagcgggtctccaagactctggaccaaaacagcaacaccaactttgcctggacggctgccagcaaatacaacctgaatggacgcaaatcattggctaatcctggtattgccatggcgactcacaaggacgatgaggagcgcttcttccctcagcacggggttctggtgtttggacagacaaatgctaccaacaagacaactttggacaatgttttaattactagtgaagaagaaattaaggctactaacccggtagctacagaggagtacgggactgtttctagcaacctgcaatccggttccaccaaccccaccacagaatctgtcaacaaccagggaatactgcctggtatggtctggcaggaccgggacgtgtacctgcagggtcccatttgggccaagattcctcacacggacggacattttcacccgtctcccctgatgggcggctttggactgaagcacccgcctccccaaattctcatcaaaaacaccccggtacctgcgaatcctccagagacttttaccacttccaagtttgccagctacatcacgcagtacagcaccgggcaggtcagcgtggaaattgaatgggagctgcagaaggaaaacagcaagcgctggaacccagagattcagtatacttccaactacgcgaaatccaacaatgttgagttctccgtggatgcagccggtgtttattctgaaccccgccctattggtactcgttacctcacccgtaatctgtaa

SEQ ID NO: 243 - DNA, 2220 bp, Adeno-Associated Virus
  source 1..2220: mol_type = other DNA; note = BCD_0278
atggctgctgacggttatcttccagattggctcgaggacaacctctctgaaggcatccgcgagtggtgggcgctgaaacctggagcccccaagcctaaagcgaatcaacaacatcaggacaacagcaggggtcttgtgcttcctgggtacaagtacctcggacccttcaacggactcgacaagggagagccggtcaacgaggcggacgccgcggccctcgagcacgacaaggcctacgacaagcagctcgagcagggggacaacccgtacctcaagtacaaccacgcggacgccgagtttcaggagcgtcttcaagaagatacgtcttttgggggcaacctcgggcgagcagtcttccaggccaaaaagaggattctcgagcctctgggtctggttgaggaagcggctaagacggctcttggaaagaagcgacctctagagaaaacccccaaccagcccacggacactcaggccgccgggcagactccagccaaaaaaaggccacagggcgagcaatctggcgactccgctagacgacagctcgactttgatccacaaccagcagctcccatcggacaaccccccgcagccccctctcctgtgggatctaatacaatggcttcaggtggtggcggaccaatggcagacgataaccaaggcgccgacggagtgggtaatgcctcgggaaattggcattgcgattccacatggctgggcgacagagtcatcaccaccagcacccgaacctgggtcctgcccacctacaacaaccacatctacaagcaaatctccagcgaatcgggagccaccaacgacaaccactacttcggctacagcaccccctgggggtattttgacttcgacagattccactgccacttctcaccacgtgactggcagcgactcatcaacaacaactggggattccgacccaagcgactcaacttcaagatcttcaacatccaggccaaagaagtcacgcagatcgagggcggctcgaccatcgccaataaccttaccagcacgattcaggtctttgcggattcggagtaccagctgccctacgtcctcggatcggctcaccagggctgcctcccgccgttcccggccggtgtcttcatgattccccagtacggatacctgactctgaacaacggcagccaatcagtgggacgttcttccttttactgcctggaatatttcccatcccagatgctgagaactggaaacaactttcaattcagctatacctttgaaagcgtgcctttccacagcagctacgcgcacagccagagcctggaccgcatcatgaaccccctggtggaccagtacctgtactacctggccagaactcagacgggtaccggaagcaccaccagcaacacgcggcagctgcagttttaccaggccgggccttccaacatggctgaccaatccaggaactggttgcctgggcccatgtaccggcagcagcgggtctccaagactctggaccaaaacagcaacaccaactttgcctggacggctgccagcaaatacaacctgaatggacgcaaatcattggctaatcctggtattgccatggcgactcacaaggacgatgaggagcgcttcttccctcagcacggggttctggtgtttggacagacaaatgctaccaacaagacaactttggacaatgttttaattactagtgaagaagaaattaaggctactaacccggtagctacagaggagtacgggactgtttctagcaacctgcaatccggttccaccaaccccaccacagaatctgtcaacaaccagggaatactgcctggtatggtctggcaggaccgggacgtgtacctgcggggtcccatttgggccaagattcctcacacggacggacattttcacacgtctcccctgatgggcggctttggactgaagcacccgcctccccaaattctcatcaaaaacaccccggtacctgcgaatcctccagagacttttaccacttccaagtttgccagctacatcacgcagtacagcaccgggcaggtcagcgtggaaattgaatgggagctgcagaaggaaaacagcaagcgctggaacccagagattcagtatacttccaactacgcgaaatccaacaatgttgagttctccgtggatgcagccggtgtttattctgaaccccgccctattggtactcgttgcctcacccgtaatctgtaa

SEQ ID NO: 244 - DNA, 2220 bp, Adeno-Associated Virus
  source 1..2220: mol_type = other DNA; note = BCD_0279
atggctgctgacggttatcttccagattggctcgaggacaacctctctgaaggcatccgcgagtggtgggcgctgaaacctggagcccccaagcctaaagcgaatcaacaacatcaggacaacagcaggggtcttgtgcttcctgggtacaagtacctcggacccttcaacggactcgacaagggagagccggtcaacgaggcggacgccgcggccctcgagcacgacaaggcctacgacaagcagctcgagcagggggacaacccgtacctcaagtacaaccacgcggacgccgagtttcaggagcgtcttcaagaagatacgttttttgggggcaacctcgggcgagcagtcttccaggccaaaaagaggattcccgagcctctgggtctggttgaggaagcggctaagacggctcctggaaagaagcgacctctagagaaaacccccaaccagcccacggacactcaggccgccgggcagactccagccaaaaaaaggccacagggcgagcaatctggcgactccgctagacgacagctcgactttgatccacaaccagcagctcccatcggacaaccccccgcagccccctctcctgtgggatctaatacaatggcttcaggtggtggcggaccaatggcagacgataaccaaggcgccgacggagtgggtaatgcctcgggaaattggcattgcgattccacatggctgggcgacagagtcatcaccaccagcacccgaacctgggtcctgcccacctacaacaaccacatctacaagcaaatctccagcgaatcgggagccaccaacgacaaccactacttcggctacagcaccccctgggggtattttgacttcaacagattccactgccacttctcaccacgtgactggcagcgactcatcaacaacaactggggattccgacccaagcgactcaacttcaagatcttcaacatccaggtcaaagaagtcacgcagatcgagggcggctcgaccatcgccaataaccttaccagcacgattcaggtctttgcggattcggagtaccagctgccctacgtcctcggatcggctcaccagggctgcctcccgccgttcccggccgatgtcttcatgattccccagtacggatacctgactctgaacaacggcagccaatcagtgggacgttcttccttttactgcctggaatattccccatcccagatgctgagaactggaaacaactttcaattcagctatacctttgaaagcgtgcctttccacagcagctacgcgcacagccagagcctggaccgcatcatgaaccccctggtggaccagtacctgtactacctggccagaactcagacgggtaccggaagcaccaccagcaacacacggcagctgcagttttaccaggccgggccttccaacatggctgaccaatccaggaactggttgcctgggcccatgtaccggcagcagcgggtctccaagactctggaccaaaacagcaacaccaactttgcctggacggctgccagcaaatacaacctgaatggacgcaaatcattggctaatcctggtattgccatggcgactcacaaggacgatgaggagcgcttcttccctcagcacggggttctggtgtttggacagacaaatgctaccaacaagacaactttggacaatgttttaattactagtgaagaagaaattaaggctactaacccggtagctacagaggagtacgggactgtttctagcaacctgcaatccggttccaccaaccccaccacagaatctgtcaacaaccagggaatactgcctggtatggtctggcaggaccgggacgtgtacctgcagggtcccatttgggccaagattcctcacacggacggacattttcacccgtctcccctgatgggcggctttggactgaagcacccgcctccccaaattctcatcaaaaacaccccggtacctgcgaatcctccagagacttttaccacttccaagtttgccagctacatcacgcagtacagcaccgggcaggtcagcgtggaaattgaatgggagctgcagaaggaaaacagcaagcgctggaacccagagattcagtatacttccaactacgcgaaatccaacaatgttgagttctccgtggatgcagccggtgtttattctgaaccccgccctattggtactcgttacctcacccgtaatctgtaa

SEQ ID NO: 245 - DNA, 2220 bp, Adeno-Associated Virus
  source 1..2220: mol_type = other DNA; note = BCD_0280
atggctgctgacggttatcttccagattggctcgaggacaacctctctgaaggcatccgtgagtggtgggcgctgaaacctggagccccacaacccaaggcgaatcaacaacatcaggacaacagcaggggtcttgtgcttcctgggtacaagtacctcggacccttcaacggactcgacaagggagagccggtcaacgaggcagacgccgcggccctcgagcacgacaaggcctacgacaagcagctcgagcagggggacaacccgtacctcaagtacaaccacgcggacgccgagtttcaggagcgtcttcaagaagatacgtcttttgggggcaacctcgggcgagcagtcttccaggccaaaaagaggattctcgagcctctgggtctggttgaggaagcggctaagacggctcctggaaagaagcgacctctagagaaaacccccaatcagcccacggacactcaggccgccgggcagactccagccaagaaaaggccacggggcgagcaatctggcgactccgctagaaggcagctcgactttgatccacaaccagcagcacccatcggacaaccccccgcagccccctctcctgtgggatctaatacaatggcttcaggtggtggcggaccaatggcagacgataaccaaggcgccgacggagtgggtaatgcctcgggaaattggcattgcgattccacatggctgggcgacagagtcatcaccaccagcacccgaacctgggtcctgcacacctacaacaaccacatctacaagcaaatctccagcgaatcgggagccaccaatgacaaccactacttcggctacagcaccccctgggggtattttgacttcaacagattccactgccacttttcaccacgtgactggcagcgactcatcaacaacaactggggattccgacccaagcgactcaacttcaagatcttcaacatccaggtcaaagaagtcacgcagatcgagggcggctcgaccatcgccaataaccttaccagcacgattcaggtctttgcggactcggagtaccagcttccctacgtcctcgggtcggctcaccagggctgcctcccgccgttcccggccgatgtcttcatgattccccagtacggatacctgactctgaacaacggcagccaatcagtgggacgctcttccttttactgcctggaatatttcccatcccagatgctgagaactggaaataactttcaattcagctatacctttgaaagcgtgcctttccacagcagctacgcgcacagccagagcctggaccgcatcatgaaccccctggtggaccagtacctgtactacctggccagaactcagacgggtaccggaagcaccaccagcaacacgcggcagctgcagttttaccaggccgggccttccaacatggctgaccaatccaggaactggttgcctgggcccatgtaccggcagcagcgggtctccaagactctggaccaaaacagcaacaccaactttgcctggacggctgccagcaaatacaacctgaatggacgcaaatcattggctaatcctggcattgccatggcgactcacaaggatgacgaggagcgcttttttcctcagcacggggttctggtgtttggacagacaaatgctaccaacaagacaactttggacaatgttttaattactagtgaagaagaaattaaggcgaccaatccggtggccacggaggagtacgggactgtttctagcaacctacaagcaagtaacaccaaccccacaacggaaactgtcaacaaccagggcatacttcctggtatggtctggcaggaccgggacgtgtacctgcagggtcccatttgggccaaaattcctcacacggacggacactttcacccgtctcccctgatgggcggctttggtctgaagcacccgcctccccagattctcatcaaaaacaccccggtacctgcgaatcctccagagacttttaccacttccaagtttgccagctacatcacacagtacagcaccggacaggtcagcgtggaaattgaatgggagctgcagaaggaaaacagcaagagatggaacccagaaattcagtacacttccaactacgcgaaatccaacaatgtggagttctccgtggatgcagccggtgtttattctgaaccccgccctattggtactcgttacctcacccgtaatctgtaa

SEQ ID NO: 246 - DNA, 2220 bp, Adeno-Associated Virus
  source 1..2220: mol_type = other DNA; note = BCD_0281
atggctgctgacggttatcttccagattggctcgaggacaacctctctgaaggcatccgtgagtggtgggcgctgaaacctggagccccacaacccaaagcgaatcaacaacatcaggacaacagcaggggtcttgtgcttcctgggtacaagtacctcggacccttcaacggactcgacaagggagagccggtcaacgaggcagacgccgcggccctcgagcacgacaaggcctacgacaagcagctcgagcagggggacaacccgtacctcaagtacaaccacgcggacgccgagtttcaggagcgtcttcaagaagatacgtcttttgggggcaacctcgggcgagcagtcttccaggccaaaaagaggattctcgagcctctgggtctggttgaggaagcggctaagacggctcctggaaagaagcgacctctagagaaaacccccaatcagcccacggacactcaggccgccgggcagactccagccaagaaaaggccacagggcgagcaatctggcgactccgctagaaggcagctcgactttgatccacaaccagcagcacccatcggacaaccccccgcagccccctctcctgtgggatctaatacaatggcttcaggtggtggcggaccaatggcagacgataaccaaggcgccgacggagtgggtaatgcctcgggaaattggcattgcgattccacatggctgggcgacagagtcatcaccaccagcacccgaacctgggtcctgcccacctacaacaaccacatctacaagcaaatctccagcgaatcgggagccaccaatgacaaccactacttcggctacagcgccccctgggggtattttgacttcaacagattccactgccacttttcaccacgtgactggcagcgactcatcaacaacaactggggattccgacccaagcgactcaacttcaagatcttcaacatccaggtcaaagaagccacgcagatcgagggcggctcgaccatcgccaataaccttaccagcacgattcaggtctttgcggactcggagtaccagcttccctacgtcctcgggtcggctcaccagggctgcctcccgccgttcccggccgatgtcttcatgattccccagtacggatacctgactctgaacaacggcagccaaccagtgggacgctcttccttttactgcctggaatatttcccatcccagatgctgagaactggaaataactttcaattcagctatacctttgaaagcgtgcctttccacagcagctacgcgcacagccagagcctggaccgcatcatgaaccccctggtggaccagtacctgtactacctggccagaactcagacgggtaccggaagcaccaccagcaacacgcggcagctgcagttttaccaggccgggccttccaacatggctgaccaatccaggaactggttgcctgggcccatgtaccggcagcagcgggtctccaagactctggaccaaaacagcaacaccaactttgcctggacggctgccagcaaatacaacctgaatggacgcaaatcattggctaatcctggcattgccatggcgactcacaaggatgacgaggagcgcttttttcctcagcacggggttctggtgtctggacagacaaatgctaccaacaagacaactttggacaatgttttaattactagtgaagaagaaattaaggcgaccaatccggtggccacggaggagtacgggactgtttctagcaacctacaagcaagtaacaccaaccccacaacggaaactgtcaacaaccagggcatacttcctggtatggtctggcaggaccgggacgtgtacctgcagggtcccatttgggccaaaattcctcacacggacggacactttcacccgtctcccctgatgggcggctttggtctgaagcacccgcctccccagattctcatcaaaaacaccccggtacctgcgaatcctccagagacttttaccacttccaagtttgccagctacatcacacagtacagcaccggacaggtcagcgtggaaattgaatgggagctgcagaaggaaaacagcaagagatggaacccagaaattcagtacacttccaactacgcgaaatccaacaatgtggagttctccgtggatgcagccggtgtttattctgaaccccgccctattggtactcgttacctcacccgtaatctgtaa

SEQ ID NO: 247 - DNA, 2220 bp, Adeno-Associated Virus
  source 1..2220: mol_type = other DNA; note = BCD_0282
atggctgctgacggttatcttccagattggctcgaggacaacctctctgaaggcatccgtgagtggtgggcgctgaaacctggagccccacaacccaaagcgaatcaacaacatcaggacaacagcaggggtcttgtgcttcctgggtacaagtacctcggacccttcaacggactcgacaagggagagccggtcaacgaggcagacgccgcggccctcgagcacgacaaggcctacgacaagcagctcgagcagggggacaacccgtacctcaagtacaaccacgcggacgccgagtttcaggagcatcttcaagaagatacgtcttttgggggcaacctcgggcgagcagtcttccaggccaaaaagaggattctcgagcctctgggtctggttgaggaagcggctaagacggctcctggaaagaagcgacctctagagaaaacccccaatcagcccacggacactcaggccgccgggcagactccagccaagaaaaggccacagggcgagcaatctggcgactccgctagaaggcagctcgactttgatccacaaccagcagcacccatcggacaaccccccgcagccccctctcctgtgggatctaatacaatggcttcaggtggtggcggaccaatggcagacgataaccaaggcgccgacggagtgggtaatgcctcgggaaattggcattgcgattccacatggctgggcgacagagtcatcaccaccagcacccgaacctgggtcctgcccacctacaacaaccacatctacaagcaaatctccagcgaatcgggagccaccaatgacaaccactacttcggctacagcaccccctgggggtattttgacttcaacagattccactgccacttttcaccacgtgactggcagcgactcatcaacaacaactggggattccgacccaagcgactcaacttcaagatcttcaacatccaggtcaaagaagtcacgcagatcgagggcggctcgaccatcgccaataaccttaccagcacgattcaggtctttgcggactcggagtaccagcttccctacgtcctcgggtcggctcaccagggctgcctcccgccgttcccggccgatgtcttcatgattccccagtacggatacctgactctgaacaacggcagccaatcggtgggacgctcttccttttactgcctggaatatttcccatcccagatgctgagaactggaaataactttcaattcagctatacctttgaaagcgtgcctttccacagcagctacgcgcacagccagagcctggaccgcatcatgaaccccctggtggaccagtacctgtactacctggccagaactcagacgggtaccggaagcaccaccagcaacacgcggcagctgcagttttaccaggccgggccttccaacatggctgaccaatccaggaactggttgcctgggcccatgtaccggcagcagcgggtctccaagactctggaccaaaacagcaacaccaactttgcctggacggctgccagcaaatacaacctgaatggacgcaaatcattggctaatcctggcattgccatggcgactcacaaggatgacgaggagcgcttttttcctcagcacggggttctggtgtttggacagacaaatgctaccaacaagacaactttggacaatgttttaattactagtgaagaagaaattaaggcgaccaatccggtggccacggaggagtacgggactgtttctagcaacccacaagcaagtaacaccaaccccacaacggaaactgtcaacaaccagggcatacttcctggtatggtctggcaggaccgggacgtgtacctgcagggtcccatttgggccaaaattcctcacacggacggacactttcacccgtctcccctgatgggcggctttggtctgaagcacccgcctccccagattctcatcaaaaacaccccggtacctgcgaatcctccagagacttttaccacttccaagtttgccagctacatcacacagtacagcaccggacaggtcagcgtggaaattgaatgggagctgcagaaggaaaacagcaagagatggaacccagaaattcagtacacttccaactacgcgaaatccaacaatgtggagttctccgtggatgcagccggtgtttattctgaaccccgccctattggtactcgttacctcacccgtaatctgtaa

SEQ ID NO: 248 - DNA, 2220 bp, Adeno-Associated Virus
  source 1..2220: mol_type = other DNA; note = BCD_0283
atggctgctgacggttatcttccagattggctcgaggacaacctctctgaaggcatccgtgagtggtgggcgctgaaacctggagccccacaacccaaagcgaatcaacaacatcaggacaacagcaggggccttgtgcttcctgggtacgagtacctcggacccttcaacggactcgacaagggagagccggtcaacgaggcagacgccgcggccctcgagcacgacaaggcctacgacaagcagctcgagcagggggacaacccgtacctcaagtacaaccacgcggacgccgagtttcaggagcgtcttcaagaagatacgtcttttgggggcaacctcgggcgagcagtcttccaggccaaaaagaggattctcgagcctctgggtctggttgaggaagcggctaagacggctcctggaaagaagcgacctctagagaaaacccccaatcagcccacggacactcaggccgccgggcagactccagccaagaaaaggccacagggcgagcaatctggcgactccgctagaaggcagctcgactttgatccacaaccagcagcacccatcggacaaccccccgcagccccctctcctgtgggatctaatacaatggcttcaggtggtggcggaccaatggcagacgataaccaaggcgccgacggagtgggtaatgcctcgggaaattggcattgcgattccacatggctgggcgacagagtcatcaccaccagcacccgaacctgggtcctgcccacctacaacaaccacatctacaagcaaatctccagcgaatcgggagccaccaatgacaaccactacttcggctacagcaccccctgggggtattttgacttcaacagattccactgccacttttcaccacgtgactggcagcgactcatcaacaacaactggggattccgacccaagcgactcaacttcaagatcttcaacatccaggtcaaagaagtcacgcagatcgagggcggctcgaccatcgccaataaccttaccagcacgattcaggtctttgcggactcggagtaccagcttccctacgtcctcgggtcggctcaccagggctgcctcccgccgttcccggccgatgtcttcatgattccccagtacggatacctgactctgaacaacggcagccaatcagtgggacgctcttccttttactgcctggaatatttcccatcccagatgctgagaactggaaataactttcaattcagctatacctttgaaagcgtgcctttccacagcagctacgcgcacagccagagcctggaccgcatcatgaaccccctggtggaccagtacctgtactacctggccagaactcagacgggtaccggaagcaccaccagcaacacgcggcagctgcagttttaccaggccgggccttccaacatggctgaccaatccaggaactggttgcctgggcccatgtaccggcagcagcgggtctccaagactctggaccaaaacagcaacaccaactttgcctggacggctgccagcaaatacaacctgaatggacgcaaatcattggctaatcctggcattgccatggcgactcacaaggatgacgaggagcgcttttttcctcagcacggggttctggtgtttggacagacaaatgctaccaacaagacaactttggacaatgttttaattactagtgaagaagaaattaaggcgaccaatccggtggccacggaggagtacgggactgtttctagcaacctacaagcaagtaacaccaaccccacaacggaaactgtcaacaaccagggcatacttcctggtatggtctggcaggaccgggacgtgtacctgcagggtcccatttgggccaaaattcctcacacggacggacactttcacccgtctcccctgatgggcggctttggtctggagcacccgcctccccagattctcatcaaaaacaccccggtacctgcgaatcctccagagacttttaccacttccaagtttgccagctacatcacacagtacagcaccggacaggtcagcgtggaaattgaatgggagctgcagaaggagaacagcaagagatggaacccagaaattcagtacacttccaactacgcgaaatccaacaatgtggagttctccgtggatgcagccggtgtttattctgaaccccgccctattggtactcgttacctcacccgtaatctgtaa

SEQ ID NO: 249 - DNA, 2220 bp, Adeno-Associated Virus
  source 1..2220: mol_type = other DNA; note = BCD_0284
atggctgctgacggttatcttccagattggctcgaggacaacctctctgaaggcatccgtgagtggtgggcgctgaaacctggagccccacaacccaaagcgaatcaacaacatcaggacaacagcaggggtcttgtgcttcctgggtacaagtacctcggacccttcaacggactcgacaagggagagccggtcaacgaggcagacgccgcggccctcgagcacgacaaggcctacgacaagcagctcgagcagggggacaacccgtacctcaagtacaaccacgcggacgccgagtttcaggagcgtcttcaagaagatacgtcttttgggggcaacctcgggcgagcagtcttccaggccaaaaagaggattctcgagcctctgggtctggttgaggaagcggctaagacggctcctggaaagaagcgacctctagagaaaacccccaatcagcccacggacactcaggccgccgggcagactccagccaagaaaaggccacagggcgagcaatctggcgactccgctagaaggcagctcgactttgatccacaaccagcagcacccatcggacaaccccccgcagccccctctcctgtgggatctaatacaatggcttcaggtggtggcggaccaatggcagacgataaccaaggcgccgacggagtgggtaatgcctcgggaaattggcattgcgattccacatggctgggcgacagagtcatcaccaccagcacccgaacctgggtcctgcccacctacaacaaccacatctacaagcaaatctccagcgaatcgggagccaccaacgacaaccactacttcggctacagcaccccctgggggtattttgacttcaacagattccactgccacttttcaccacgtgactggcagcgactcatcaacaacaactggggattccgacccaagcgactcaacttcaagatcttcaacatccaggtcaaagaagtcacgcagatcgagggcggctcgaccatcgccaataaccttaccagcacgattcaggtctttgcggactcggagtaccagcttccctacgtcctcgggtcggctcaccagggctgcctcccgccgttcccggccgatgtcttcatgattccccagtacggatacctgactctgaacaacggcagccaatcagtgggacgctcttccttttactgcctggaatatttcccatcccagatgctgagaactggaaataactttcaattcagctatacctttgaaagcgtgcctttccacagcagctacgcgcacagccagagcctggaccgcatcatgaaccccctggtggaccagtacctgtactacctggccagaactcagacgggtaccggaagcaccaccagcaacacgcggcagctgcagttttaccaggccgggccttccaacatggctgaccaatccaggaactggttgcctgggcccatgtaccggcagcagcgggtctccaagactctggaccaaaacagcaacaccaactttgcctggacggctgccagcaaatacaacctgaatggacgcaaatcattggctaatcctggcattgccatggcgactcacaaggatgacgaggagcgcttttttcctcagcacggggttctggtgtttggacagacaaatgctaccaacaagacaactttggacaatgttttaattactagtgaagaagaaattaaggcgaccaatccggtggccacggaggagtacgggactgtttctagcaacctacaagcaagtaacaccaaccccacaacggaaactgtcaacaaccagggcatacttcctggtatggtctggcaggaccgggacgtgtacctgcagggtcccatttgggccaaaattcctcacacggacggacactttcacccgtctcccctgatgggcggctttggtctgaagcacccgcctccccagattctcatcaaaaacaccccggtacctgcgaatcctccagagacttttaccacttccaagtttgccagctacatcacacagtacagcaccggacaggtcagcgtggaaattgaatgggagctgcagaaggaaaacagcaagagatggaacccagaaattcagtacacttccaactacgcgaaatccaacaatgtggagttctccgtggatgcagccggtgtttattctgaaccccgccctattggtactcgttacctcacccgtaatctgtaa

SEQ ID NO: 250 - DNA, 2220 bp, Adeno-Associated Virus
  source 1..2220: mol_type = other DNA; note = BCD_0285
atggctgctgacggttatcttccagattggctcgaggacaacctctctgaaggcatccgtgagtggtgggcgctgaaacctggagccccacaacccaaagcgaatcaacaacatcaggacaacagcaggggtcttgtgcttcctgggtacaagtacctcggacccttcaacggactcgacaagggagagccggtcaacgaggcagacgccgcggccctcgagcacgacaaggcctacgacaagcagctcgagcagggggacaacccgtacctcaagtacaaccacgcggacgccgagtttcaggagcgtcttcaagaagatacgtcttttgggggcaacctcgggcgagcagtcttccaggccaaaaagaggattctcgagcctctgggtctggttgaggaagcggctaagacggctcctggaaagaagcgacctctagagaaaacccccaatcagcccacggacactcaggccgccgggcagactccagccaagaaaaggccacagggcgagcaatctggcgactccgctagaaggcagctcgactttgatccacaaccagcagcacccatcggacaaccccccgcagccccctctcctgtgggatctaatacaatggcttcaggtggtggcggaccaatggcagacgataaccaaggcgccgacggagtgggtaatgcctcgggaaattggcattgcgattccacatggctgggcgacagagtcatcaccaccagcacccgaacctgggtcctgcccacctacaacaaccacatctacaagcaaatctccagcgaatcgggagccaccaatgacaaccactacttcggctacagcaccccctgggggtattttgacttcaacagattccactgccacttttcaccacgtgactggcagcgactcatcaacaacaactggggattccgacccaagcgacacaacttcaagatcttcaacatccaggtcaaagaagtcacgcagatcgagggcggctcgaccatcgccaataaccttaccagcacgattcaggtctttgcggactcggagtaccagcttccctacgtcctcgggtcggctcaccagggctgcctcccgccgttcccggccgatgtcttcatgattccccagtacggatacctgactctgaacaacggcagccaatcagtgggacgctcttccttttactgcctggaatatttcccatcccagatgctgagaactggaaataactttcaattcagctatacctttgaaagcgtgcctttccacagcagctacgcgcacagccagagcctggaccgcatcatgaaccccctggtggaccagtacctgtactacctggccagaactcagacgggtaccggaagcaccaccagcaacacgcggcagccgcagttttaccaggccgggccttccaacatggctgaccaatccaggaactggttgcctgggcccatgtaccggcagcagcgggtctccaagactctggaccaaaacagcaacaccaactttgcctggacggctgccagcaaatacaacctgaatggacgcaaatcattggctaatcctggcattgccatggcgactcacaaggatgacgaggagcgcttttttcctcagcacggggttctggtgtttggacagacaaatgctgccaacaagacaactttggacaatgttttaattactagtgaagaagaaattaaggcgaccaatccggtggccacggaggagtacgggactgtttctagcaacctacaagcaagtaacaccaaccccacaacggaaactgtcaacaaccagggcatacttcctggtatggtctggcaggaccgggacgtgtacctgcagggtcccatttgggccaaaattcctcacacggacggacactttcacccgtctcccctgatgggcggctttggtctgaagcacccgcctccccagattctcatcaaaaacaccccggtacctgcgaatcctccagagacttctaccacttccaagtttgccagctacatcacacagtacagcaccggacaggtcagcgtggaaattgaatgggagctgcagaaggaaaacagcaagagatggaacccagaaattcagtacacttccaactacgcgaaatccaacaatgtggagttctccgtggatgcagccggtgtttattctgaaccccgccctattggtactcgttacctcacccgtaatctgtaa

SEQ ID NO: 251 - DNA, 2220 bp, Adeno-Associated Virus
  source 1..2220: mol_type = other DNA; note = BCD_0286
atggctgctgacggttatcttccagattggctcgaggacaacctctctgaaggcattcgcgagtggtgggcgctgaaacctggagccccacaacccaaggccaaccaacagcatcaggacaacggcaggggtcttgtgcttcctgggtacaagtacctcggacccttcaacggactcgacaagggagagccggtcaacgaggcagacgccgcggcgctcgagcacgacaaggcatacgacaagcagctcgagcagggggacaacccgtacctcaagtacaaccacgcggacgccgagtttcaggagcgtcttcaagaagatacgtcttttgggggcaacctcgggcgagcagtcttccaggccaaaaagaggattctcgagcctctgggtctggttgaggaagcggctaagacggctcctggaaagaagcgacctctagagaaaacccccaaccagcccacggacacccaggccgccgggcagactccagccaagaaaaggccacagggcgagcaatctggcgactccgctagacggcagctcgactttgatccacaaccagcagctcccatcggacaaccccccgcagccccctctcctgtgggatctaatacaatggcttcaggtggtggcggaccaatggcagacgataaccaaggcgccgacggagtgggtaatgcctcgggaaattggcattgcgattccacatggctgggcgacagagtcatcaccaccagcacccgaacctgggtcctgcccacctacaacaaccacatctacaagcaaatctccagcgaatcgggagccaccaacgacaaccactacttcggctacagcaccccctgggggtattttgacttcaacagattccactgccacttttcaccacgtgactggcagcgactcatcaacaacaactggggattccggcccaagcgactcaacttcaagatcttcaacatccaggtcaaagaagtcacgcagatcgagggcggctcgaccatcgccaataaccttaccagcacgattcaggtctttgcggactcggagtaccagctgccctacgtcctcggatcggctcaccagggctgcctcccgccgttcccggccgatgtcttcatgattcctcagtacggatacctgactctaaacaacggcagccaatcagtgggacgctcttccttttactgcctggaatacttcccatcccagatgctgagaactggaaacaactttcaattcagctatacctttgaaagcgtgcctttccacagcagctacgcgcacagccagagcctggaccgcatcatgaaccccctggtggaccagtacctgtactacctggccagaactcaaacgggtaccggaagcaccaccagcaacacgcggcagctgcagttttaccaggccgggccttccaacatggctgaccaatccaggaactggttgcctgggcccatgtaccggcagcagcgggtctccaagactctggaccaaaacagcaacaccaactttgcctggacggctgccagcaaatacaacctgaatggacgcaagtcattggctaatcctggcattgccatggcgactcacaaggacgacgaggagcgcttcttccctcagcatggggttctggtgtttggacaaacaaatgctacgaacaagaccactttggacaacgtgttgattactagcgaagaggaaattaaggctacaaacccggtagccacagaggagtacgggaccgtttccagcaacctgcaatcttctactaccaatcccaccacagaatctgtcaacaaccagggaatactgcctggtatggtttggcaggaccgggacgtgtacctgcagggtcccatttgggccaaaattcctcacacggatggacactttcacccgtctcccctgatgggcggctttggactgaagcacccgcctccccagattctcatcaaaaacaccccggtacctgcgaatcctccagagactttcaccacttccaagtttgccagctacataacgcagtacagcactgggcaggtcagcgtggaaattgaatgggagctgcagaaggaaaacagcaagcgctggaacccagagatccagtacacttccaactacgcgaaatccaacaatgtggagttctccgtggatgcagccggtgtttattctgaaccccgccctattggtactcgttacctcacccgtaatctgtaa

SEQ ID NO: 252 - DNA, 2220 bp, Adeno-Associated Virus
  source 1..2220: mol_type = other DNA; note = BCD_0287
atggctgctgacggttatcttccagattggctcgaggacaacctctctgaaggcattcgcgagtggtgggcgctgaaacctggagccccacaacccaaggccaaccaacagcatcaggacaacggcaggggtcttgtgcttcctgggtacaagtacctcggacccttcaacggactcgacaagggagagccggtcaacgaggcagacgccgcggcgctcgagcacgacaaggcatacgacaagcagctcgagcagggggacaacccgtacctcaagtacaaccacgcggacgccgagtttcaggagcgtcttcaagaagatacgtcttttgggggcaacctcgggcgagcagtcttccaggccaaaaagaggattctcgagcctctgggtctggttgaggaagcggctaagacggctcctggaaagaagcgacctctagagaaaacccccaaccagcccacggacacccaggccgccgggcagactccagccaagaaaaggccacagggcgagcaatctggcgactccgctagacggcagctcgactttgatccacaaccagcagctcccatcggacaaccccccgcagccccctctcctgtgggatctaatacaatggcttcaggtggtggcggaccaatggcagacgataaccaaggcgccgacggagtgggtaatgcctcgggaaattggcattgcgattccacatggctgggcgacagagtcatcaccaccagcacccgaacctgggtcctgcccacctacaacaaccacgtctacaagcaaatctccggcgaatcgggagccaccaacgacaaccactacttcggctacagcaccccctgggggtattttgacttcaacagattccactgccacttttcaccacgtgactggcagcgactcatcaacaacaactggggattccggcccaagcgactcaacttcaagatcttcaacatccaggtcaaagaagtcacgcagatcgagggcggctcgaccatcgccaataaccttaccagcacgattcaggtctttgcggactcggagtaccagctgccctacgtcctcggatcggctcaccagggctgcctcccgccgttcccggccgatgtcttcatgattcctcagtacggatacctgactctaaacaacggcagccaatcagtgggacgctcttccttttactgcctggaatacttcccatcccagatgctgagaactggaaacaactttcaattcagctatacctttgaaagcgtgcctttccacagcagctacgcgcacagccagagcctggaccgcatcatgaaccccctggtggaccagtacctgtactacctggccagaactcaaacgggtaccggaagcaccaccagcaacacgcggcagctgcagttttaccaggccgggccttccaacatggctgaccaatccaggaactggttgcctgggcccatgtaccggcagcagcgggtctccaagactctggaccaaaacagcaacaccaactttgcctggacggctgccagcaaatacaacctgaatggacgcaagtcattggctaatcctggcattgccatggcgactcacaaggacgacgaggagcgcttcttccctcagcatggggttctggtgtttggacaaacaaatgctacgaacaagaccactttggacaacgtgttgattactagcgaagaggaaattaaggctacaaacccggtagccacagaggagtacgggaccgtttccagcaacctgcaatcttctactaccaatcccaccacagaatctgtcaacaaccagggaatactgcctggtatggtttggcaggaccgggacgtgtacctgcagggtcccatttgggccaaaattcctcacacggatggacactttcacccgtctcccctgatgggcggctttggactgaagcacccgcctccccagattctcatcaaaaacaccccggtacctgcgaatcctccagagactttcaccacttccaagtttgccagctacataacgcagtacagcactgggcaggtcagcgtggaaattgaatgggagctgcagaaggaaaacagcaagcgctggaacccagagatccagtacacttccaactacgcgaaatccaacaatgtggagttctccgcggatgcagccggtgtttattctgaaccccgccctattggtactcgttacctcacccgtaatctgtaa

SEQ ID NO: 253 - DNA, 2220 bp, Adeno-Associated Virus
  source 1..2220: mol_type = other DNA; note = BCD_0288
atggctgctgacggttatcttccagattggctcgaggacaacctctctgaaggcattcgcgagtggtgggcgctgaaacctggagccccacaacccaaggccaaccaacagcatcaggacaacggcaggggtcttgtgcttcctgggtacaagtacctcggacccttcaacggactcgacaagggagagccggtcaacgaggcagacgccgcggcgctcgagcacgacaaggcatacgacaagcagctcgagcagggggacaacccgtacctcaagtacaaccacgcggacgccgagtttcaggagcgtcttcaagaagatacgtcttttgggggcaacctcgggcgagcagtcttccaggccaaaaagaggattctcgagcctctgggtctggttgaggaagcggctaagacggctcctggaaagaagcgacctctagagaaaacccccaaccagcccacggacacccaggccgccgggcagactccagccaagaaaaggccacagggcgagcaatctggcgactccgctagacggcagctcgactttgatccacaaccagcagctcccatcggacaaccccccgcagccccctctcctgtgggatctaatacaatggcttcaggtggtggcggaccaatggcagacgataaccaaggcgccgacggagtgggtaatgcctcgggaaattggcattgcgattccacatggctgggcgacagagtcatcaccaccagcacccgaacctgggtcctgcccacctacaacaaccacatctacaagcaaatctccagcgaatcgggagccaccaacgacaaccactacttcggctacagcaccccctgggggtattttgacttcaacagattccactgccacttttcaccacgtgactggcagcgactcatcaacaacaactggggattccggcccaagcgactcaacttcaagatcttcaacatccaggtcaaagaagtcacgcagatcgagggcggctcgaccatcgccaataaccttaccagcacgattcaggtctttgcggactcggagtaccagctgccctacgtcctcggatcggctcaccagggctgcctcccgccgttcccggccgatgtcttcatgattcctcagtacggatacctgactctaaacaacggcagccaatcagtgggacgctcttccttttactgcctggaatacttcccatcccagatgctgagaactggaaacaactttcaattcagctatacctttgaaagcgtgcctttccacagcagctacgcgcacagccagagcctggaccgcatcatgaaccccctggtggaccagtacctgtactacctggccagaactcaaacgggtaccggaagcaccaccagcaacacgcggcagctgcagttttaccaggccgggccttccaacatggctgaccaatccaggaactggttgcctgggcccatgtaccggcagcagcgggtctccaagactctggaccaaaacagcaacaccaactttgcctggacggctgccagcaaatacaacctgaatggacgcaagtcattggctaatcctggcattgccatggcgactcacaaggacgacgaggagcgcttcttccctcagcatggggttctggtgtttggacaaacaaatgctacgaacaagaccactttggacaacgtgttgattactagcgaagaggaaattaaggctacaaacccggtagccacagaggagtacgggaccgtttccagcaacctgcaatcttctactaccaatcccaccacagaatctgtcaacaaccagggaatactgcctggtatggtttggcaggaccgggacgtgtacctgcagggtcccatttgggccaaaattcctcacacggatggacactttcacccgtctcccctgatgggcggctttggactgaagcacccgcctccccagattctcatcaaaaacgccccggtacctgcgaatcctccagagactttcaccacttccaagtttgccagctacataacgcagtacagcactgggcaggtcagcgtggaaattgaatgggagctgcagaaggaaaacagcaagcgctggaacctagagatccagtacacttccaactacgcgaaatccaacaatgtggagttctccgtggatgcagccggtgtttattctgaaccccgccctattggtactcgttacctcacccgtaatctgtaa

SEQ ID NO: 254 - DNA, 2220 bp, Adeno-Associated Virus
  source 1..2220: mol_type = other DNA; note = BCD_0289
atggctgctgacggttatcttccagattggctcgaggacaacctctctgaaggcattcgcgagtggtgggcgctgaaacctggagccccacaacccaaggccaaccaacagcatcaggacaacggcaggggtcttgtgcttcctgggtacaagtacctcggacccttcaacggactcgacaagggagagccggtcaacgaggcagacgccgcggcgctcgagcacgacaaggcatacgacaagcagctcgagcagggggacaacccgtacctcaagtacaaccacgcggacgccgagtttcaggagcgtcttcaagaagatacgtcttttgggggcaacctcgggcgagcagtcttccaggccaaaaagaggattctcgagcctctgggtctggttgaggaagcggctaagacggctcctggaaagaagcgacctctagagaaagcccccaaccagcccacggacacccaggccgccgggcagactccagccaagaaaaggccacagggcgagcaatctggcgactccgctagacggcagctcgactttgatccacaaccagcagctcccatcggacaaccccccgcagccccctctcctgtgggatctaatacaatggcttcaggtggtggcggaccaatggcagacgataaccaaggcgccgacggagtgggtaatgcctcgggaaattggcattgcgattccacatggctgggcgacagagtcatcaccaccagcacccgaacctgggtcctgcccacctacaacaaccacatctacaagcaaatctccagcgaatcgggagccaccaacgacaaccactacttcggctacagcaccccctgggggtattttgacttcaacagattccactgccacttttcaccacgtgactggcagcgactcatcaacaacaactggggattccggcccaagcgactcaacttcaagatcttcaacatccaggtcaaagaagtcacgcagatcgagggcggctcgaccatcgccaataaccttaccagcacgattcaggtctttgcggactcggagtaccagctgccctacgtcctcggatcggctcaccagggctgcctcccgccgttcccggccgatgtcttcatgattcctcagtacggatacctgactctaaacaacggcagccaatcagtgggacgctcttccttttactgcctggaatacttcccatcccagatgctgagaactggaaacaactttcaattcagctatacctttgaaagcgtgcctttccacagcagctacgcgcacagccagagcctggaccgcatcatgaaccccctggtggaccagtacctgtactacctggccagaactcaaacgggtaccggaagcaccaccagcaacacgcggcagctgcagttttaccaggccgggccttccaacatggctgaccaatccaggaactggttgcctgggcccatgtaccggcagcagcgggtctccaagactctggaccaaaacagcaacaccaactttgcctggacggctgccagcaaatacaacctgaatggacgcaagtcattggctaatcctggcattgccatggcgactcacaaggacgacgaggagcgcttcttccctcagcatggggttctggtgtttggacaaacaaatgctacgaacaagaccactttggacaccgtgttgattactagcgaagaggaaattaaggctacaaacccggtagccacagaggagtacgggaccgtttccagcaacctgcaatcttctactaccaatcccaccacagaatctgtcaacaaccagggaatactgcctggtatggtttggcaggaccgggacgtgtacctgcagggtcccatttgggccaaaattcctcacacggatggacactttcacccgtctcccctgatgggcggctttggactgaagcacccgcctccccagattctcatcaaaaacaccccggtacctgcgaatcctccagagactttcaccacttccaagtttgccagctacataacgcagtacagcactgggcaggtcagcgtggaaattgaatgggagctgcagaaggaaaacagcaagcgctggaacccagagatccagtacacttccaactacgcgaaatccaacaacgtggagttctccgtggatgcagccggtgtttattctgaaccccgccctattggtactcgttacctcacccgtaatctgtaa

SEQ ID NO: 255 - DNA, 2220 bp, Adeno-Associated Virus
  source 1..2220: mol_type = other DNA; note = BCD_0290
atggctgctgacggttatcttccagattggctcgaggacaacctctctgaaggcattcgcgagtggtgggcgctgaaacctggagccccacaacccaaggccaaccaacagcatcaggacaacggcaggggtcttgtgcttcctgggtacaagtacctcggacccttcaacggactcgacaagggagagccggtcaacgaggcagacgccgcggcgctcgagcacgacaaggcatacgacaagcagctcgagcagggggacaacccgtacctcaagtacaaccacgcggacgccgagtttcaggagcgtcttcaagaagatacgtcttttgggggcaacctcgggcgagcagtcttccaggccaaaaagaggattctcgagcctctgggtctggttgaggaagcggctaagacggctcctggaaagaagcgacctctagagaaaacccccaaccagcccacggacacccaggccgccgggcagactccagccaagaaaaggccacagggcgagcaatctggcgactccgctagacggcagctcgactttgatccacaaccagcagctcccatcggacaaccccccgcagccccctctcctgtgggatctaatacaatggcttcaggtggtggcggaccaatggcagacgataaccaaggcgccgacggagtgggtaatgcctcgggaaattggcattgcgattccacatggctgggcggcagagtcatcaccaccagcacccgaacctgggtcctgcccacctacaacaaccacatctacaagcaaatctccagcgaatcgggagccaccaacgacaaccactacttcggctacagcaccccctgggggtattttgacttcaacagattccactgccacttttcaccacgtgactggcagcgactcatcaacaacaactggggattccggcccaagcgactcaacttcaagatcttcaacatccaggtcaaagaagtcacgcagatcgagggcggctcgaccatcgccaataaccttaccagcacgattcaggtctttgcggactcggagtaccagctgccctacgtcctcggatcggctcaccagggctgcctcccgccgttcccggccgatgtcttcatgattcctcagtacggatacctgactctaaacaacggcagccaatcagtgggacgctcttccttttactgcctggaatacttcccatcccagatgctgagaactggaaacaactttcaattcagctatacctttgaaagcgtgcctttccacagcagctacgcgcacagccagagcctggaccgcatcatgaaccccctggtggaccagtacctgtactacctggccagaactcaaacgggtaccggaagcaccaccagcaacacgcggcagctgcagttttaccaggccgggccttccaacatggctgaccaatccaggaactggttgcctgggcccatgtaccggcagcagcgggtctccaagactctggaccaaagcagcaacaccaactttgcctggacggctgccagcaaatacaacctgaatggacgcaagtcattggctaatcctggcattgccatggcgactcacaaggacgacgaggagcgcttcttccctcagcatggggttctggtgtttggacaaacaaatgctacgaacaagaccactttggacaacgtgttgattactagcgaagaggaaattaaggctacaaacccggtagccacagaggagtacgggaccgtttccagcaacctgcaatcttctactaccaatcccaccacagaatctgtcaacaaccagggaatactgcctggtatggtttggcaggaccgggacgtgtacctgcagggtcccatttgggccaaaattcctcacacggatggacactttcacccgtctcccctgatgggcggctttggactgaagcacccgcctccccagattctcatcaaaaacaccccggtacctgcgaatcctccagagactttcaccacttccaagtttgccagctacataacgcagtacagcactgggcaggtcagcgtggaaattgaatgggagctgcagaaggaaaacagcaagcgctggaacccagagatccggtacacttccaactacgcgaaatccaacaatgtggagttctccgtggatgcagccggtgtttattctgaaccccgccctattggtactcgttacctcacccgtaatctgtaa

SEQ ID NO: 256 - DNA, 2220 bp, Adeno-Associated Virus
  source 1..2220: mol_type = other DNA; note = BCD_0291
atggctgctgacggttatcttccagattggctcgaggacaacctctctgaatgcattcgcgagtggtgggcgctgaaacctggagccccacaacccaaggccaaccaacagcatcaggacaacggcaggggtcttgtgcttcctgggtacaagtacctcggacccttcaacggactcgacaagggagagccggtcaacgaggcagacgccgcggcgctcgagcacgacaaggcatacgacaagcagctcgagcagggggacaacccgtacctcaagtacaaccacgcggacgccgagtttcaggagcgtctccaagaagatacgtcttttgggggcaacctcgggcgagcagtcttccaggccaaaaagaggattctcgagcctctgggtctggttgaggaagcggctaagacggctcctggaaagaagcgacctctagagaaaacccccaaccagcccacggacacccaggccgccgggcagactccagccaagaaaaggccacagggcgagcaatctggcgactccgctagacggcagctcgactttgatccacaaccagcagctcccatcggacaaccccccgcagccccctctcctgtgggatctaatacaatggcttcaggtggtggcggaccaatggcagacgataaccaaggcgccgacggagtgggtaatgcctcgggaaattggcattgcgattccacatggctgggcgacagagtcatcaccaccagcacccgaacctgggtcctgcccacctacaacaaccacatctacaagcaaatctccagcgaatcgggagccaccaacgacaaccactacttcggctacagcaccccctgggggtattttgacttcaacagattccactgccacttttcaccacgtgactggcagcgactcatcaacaacaactggggattccggcccgagcgactcaacttcaaggtcttcaacatccaggtcaaagaagtcacgcagatcgagggcggctcgaccatcgccaataaccttaccagcacgattcaggtctttgcggactcggagtaccagctgccctacgtcctcggatcggctcaccagggctgcctcccgccgttcccggccgatgtcttcatgattcctcagtacggatacctgactctaaacaacggcagccaatcagtgggacgctcttccttttactgcctggaatacttcccatcccagatgctgagaactggaaacaactttcaattcagctatacctttgaaagcgtgcctttccacggcagctacgcgcacagccagagcctggaccgcatcatgaaccccctggtggaccagtacctgtactacctggccagaactcaaacgggtaccggaagcaccaccagcaacacgcggcagctgcagttttaccaggccgggccttccaacatggctgaccaatccaggaactggttgcctgggcccatgtaccggcagcagcgggtctccaagactctggaccaaaacagcaacaccaactttgcctggacggctgccagcaaatacaacctgaatggacgcaagtcattggctaatcctggcattgccatggcgactcacaaggacgacgaggagcgcttcttccctcagcatggggttctggtgtttggacaaacaaatgctacgaacaagaccactttggacaacgtgttgattactagcgaagaggaaattaaggctacaaacccggtagccacagaggagtacgggaccgtttccagcaacctgcaatcttctactaccaatcccaccacagaatctgtcaacaaccagggaatactgcctggtatggtttggcaggaccgggacgtgtacctgcagggtcccatttgggccaaaattcctcacacggatggacactttcacccgtctcccctgatgggcggctttggactgaagcacccgcctccccagattctcatcaaaaacaccccggtacctgcgaatcctccagagactttcaccacttccaagtttgccagctacataacgcagtacagcactgggcaggtcagcgtggaaattgaatgggagctgcagaaggaaaacagcaagcgctggaacccagagatccagtacacttccaactacgcgaaatccaacaatgtggagttctccgtggatgcagccggtgtttattctgaaccccgccctattggtactcgttacctcacccgtaatctgtaa

SEQ ID NO: 257 - DNA, 2220 bp, Adeno-Associated Virus; identical to SEQ ID NO: 251
  source 1..2220: mol_type = other DNA; note = BCD_0292

SEQ ID NO: 258 - DNA, 2220 bp, Adeno-Associated Virus
  source 1..2220: mol_type = other DNA; note = BCD_0293
atggctgctgacggttatcttccagattggctcgaggacaacctctctgaaggcattcgcgagtggtgggcgctgaaacctggagccccacaacccaaggccaaccaacagcatcaggacaacggcaggggtcttgtgcttcctgggtacaagtacctcggacccttcaacggactcgacgagggagagccggtcaacgaggcagacgccgcggcgctcgagcacgacaaggcatacgacaagcagctcgagcagggggacaacccgtacctcaagtacaaccacgcggacgccgagtttcaggagcgtcttcaagaagatacgtcttttgggggcaacctcgggcgagcagtcttccaggccaaaaagaggattctcgagcctctgggtctggttgaggaagcggctaagacggctcctggaaagaagcgacctctagagaaaacccccaaccagcccacggacacccaggccgccgggcagactccagccaagaaaaggccacagggcgagcaatctggcgactccgctagacggcagctcgactttgatccacaaccagcagctcccatcggacaaccccccgcagccccctctcctgtgggatctaatacaatggcttcaggtggtggcggaccaatggcagacgataaccaaggcgccgacggagtgggtaatgcctcgggaaattggcattgcgattccacatggctgggcgacagagtcatcaccaccagcacccgaacctgggtcctgcccacctacaacaaccacatctacaagcaaatctccagcgaatcgggagccaccaacgacaaccactacttcggctacagcaccccctgggggtattttgacttcaacagattccactgccacttttcaccacgtgactggcagcgactcatcaacaacaactggggattccggcccaagcgactcaacttcaagatcttcaacatccaggtcaaagaagtcacgcagatcgagggcggctcgaccatcgccaataaccttaccagcacgattcaggtctttgcggactcggagtaccagccgccctacgtcctcggatcggctcaccagggctgcctcccgccgttcccggccgatgtcttcatgattcctcagtacggatacctgactctaaacaacggcagccaatcagtgggacgctcttccttttactgcctggaatacttcccatcccagatgctgagaactggaaacaactttcaattcagctatacctttgaaagcgtgcctttccacagcagctacgcgcacagccagagcctggaccgcatcatgaaccccctggtggaccagtacctgtactacctggccagaactcaaacgggtaccggaagcaccaccagcaacacgcggcagctgcagttttaccaggccgggccttccaacatggctgaccaatccaggaactggttgcctgggcccatgtaccggcagcagcgggtctccaagactctggaccaaaacagcaacaccaactttgcctggacggctgccagcaaatacaacctgaatggacgcaagtcattggctaatcctggcattgccatggcgactcacaaggacgacgaggagcgcttcttccctcagcatggggttctggtgtttggacaaacaaatgctacgaacaagaccactttggacaacgtgttgattactagcgaagaggaaattaaggctacaaacccggtagccacagaggagtacgggaccgtttccagcaacctgcaatcttctactaccaatcccaccacagaatctgtcaacaaccagggaatactgcctggtatggtttggcaggaccgggacgtgtacctgcagggtcccatttgggccaaaattcctcacacggatggacactttcacccgtctcccctgatgggcggctttggactgaagcacccgcctccccagattctcatcaaaaacaccccggtacctgcgaatcctccagagactttcaccacttccaagtttgccagctacataacgcagtacagcactgggcaggtcagcgtggaaattgaatgggagctgcaggaggaaaacagcaagcgctggaacccagagatccagtacacttccaactacgcgaaatccaacaatgtggagttctccgtggatgcagccggtgtttattctgaaccccgccctattggtactcgttacctcacccgtaatctgtaa

SEQ ID NO: 259 - DNA, 2220 bp, Adeno-Associated Virus
  source 1..2220: mol_type = other DNA; note = BCD_0294
atggctgctgacggttatcttccagattggctcgaggacaacctctctgaaggcattcgcgagtggtgggcgctgaaacctggagccccacaacccaaggccaaccaacagcatcaggacaacggcaggggtcttgtgcttcctgggtacaagtacctcggacccctcaacggactcgacaagggagagccggtcaacgaggcagacgccgcggcgctcgagcacgacaaggcatacgacaagcagctcgagcagggggacaacccgtacctcaagtacaaccacgcggacgccgagtttcaggagcgtcttcaagaagatacgtcttttgggggcaacctcgggcgagcagtcttccaggccaaaaagaggattctcgagcctctgggtctggttgaggaagcggctaagacggctcctggaaagaagcgacctctagagaaaacccccaaccagcccacggacacccaggccgccgggcagactccagccaagaaaaggccacagggcgagcaatctggcgactccgctagacggcagctcgactttgatccacaaccagcagctcccatcggacaaccccccgcagccccctctcctgtgggatctaatacaatggcttcaggtggtggcggaccaatggcagacgataaccaaggcgccgacggagtgggtaatgcctcgggaaattggcattgcgattccacatggctgggcgacagagtcatcaccaccagcacccgaacctgggtcctgcccacctacaacaaccacatctacaagcaaatctccagcgaatcgggagccaccaacgacaaccactacttcggctacagcaccccctgggggtattttgacttcaacagattccactgccacttttcaccacgtgactggcagcgactcatcaacaacaactggggattccggcccgagcgactcaacttcaagatcttcaacatccaggtcaaagaagtcacgcagatcgagggcggctcgaccatcgccaataaccttaccagcacgattcaggtctttgcggactcggagtaccagctgccctacgtcctcggatcggctcaccagggctgcctcccgccgttcccggccgatgtcttcatgattcctcagtacggatacctgactctaaacaacggcagccaatcagtgggacgctcttccttttactgcctggaatacttcccatcccagatgctgagaactggaaacaactttcaattcagctatacctttgaaagcgtgcctttccacagcagctacgcgcacagccagagcctggaccgcatcatgaaccccctggtggaccagtacctgtactacctggccagaactcaaacgggtaccggaagcaccaccagcaacacgcggcagctgcagttttaccaggccgggccttccaacatggctgaccaatccaggaactggttgcctgggcccatgtaccggcagcagcgggtctccaagactctggaccaaaacagcaacaccaactttgcctggacggctgccagcaaatacaacctgaatggacgcaagtcattggctaatcctggcattgccatggcgactcacaaggacgacgaggagcgcttcttccctcagcatggggttctggtgtttggacaaacaaatgctacgaacaagaccactttggacaacgtgttgattactagcgaagaggaaattaaggctacaaacccggtagccacagaggagtacgggaccgtttccagcaacctgcaatcttctactaccaatcccaccacagaatctgtcaacaaccagggaatactgcctggtatggtttggcaggaccgggacgtgtacctgcagggtcccatttgggccaaaattcctcacacggatggacactttcacccgtctcccctgatgggcggctttggactgaagcacccgcctccccagattctcatcaaaaacaccccggtacctgcgaatcctccagagactttcaccacttccaagtttgccagctacataacgcagtacagcactgggcaggtcagcgtggaaattgaatgggagctgcagaaggaaaacagcaagcgctggaacccagagatccagtacacttccaactacgcgaaatccaacaatgtggagttctccgtggatgcagccggtgtttattctgaaccccgccctattggtactcgttacctcacccgtaatctgtaa

SEQ ID NO: 260 - DNA, 2220 bp, Adeno-Associated Virus
  source 1..2220: mol_type = other DNA; note = BCD_0295
atggctgctgacggttatcttccagattggctcgaggacaacctctctgaaggcattcgcgagtggtgggcgctgaaacctggagccccacaacccaaggccaaccaacagcatcaggacaacggcaggggtcttgtgcttcctgggtacaagtacctcggacccttcaacggactcgacaagggagagccggtcaacgaggcagacgccgcggcgctcgagcacgacaaggcatacgacaagcagctcgagcagggggacaacccgtacctcaagtacaaccacgcggacgccgagttccaggagcgtcttcaagaagatacgtcttttgggggcaacctcgggcgagcagccttccaggccaaaaagaggattctcgagcctctgggtctggttgaggaagcggctaagacggctcctggaaagaagcgacctctagagaaaacccgcaaccagcccacggacacccaggccgccgggcagactccagccaagaaaaggccacagggcgagcaatctggcgactccgctagacggcagctcgactttgatccacaaccagcagctcccatcggacaaccccccgcagccccctctcctgtgggatctaatacaatggcttcaggtggtggcggaccaatggcagacgataaccaaggcgccgacggagtgggtaatgcctcgggaaattggcattgcgattccacatggctgggcgacagagtcatcaccaccagcacccgaacctgggtcctgcccacctacaacaaccacatctacaagcaaatctccagcgaatcgggagccaccaacgacaaccactacttcggctacagcaccccctgggggtattttgacttcaacagattccactgccacttttcaccacgtgactggcagcgactcatcaacaacaactggggattccggcccaagcgactcaacttcaagatcttcaacatccaggtcaaagaagtcacgcagatcgagggcggctcgaccatcgccaataaccttaccagcacgattcaggtctttgcggactcggagtaccagctgccctacgtcctcggatcggctcaccagggctgcctcccgccgttcccggccgatgtcttcatgattcctcagtacggatacctgactctaaacaacggcagccaatcagtgggacgctcttccttttactgcctggaatacttcccatcccagatgctgagaactggaaacaactttcaattcagctatacctttgaaagcgtgcctttccacagcagctacgcgcacagccagagcctggaccgcatcatgaaccccctggtggaccagtacctgtactacctggccagaactcaaacgggtaccggaagcaccaccagcaacacgcggcagctgcagttttaccaggccgggccttccaacatggctgaccaatccaggaactggttgcctgggcccatgtaccggcagcagcgggtctccaagactctggaccaaaacagcaacaccaactttgcctggacggctgccagcaaatacaacctgaatggacgcaagtcattggctaatcctggcattgccatggcgactcacaaggacgacgaggagcgcttcttccctcagcatggggttctggtgtttggacaaacaaatgctacgaacaagaccactttggacaacgtgttgattactagcgaagaggaaattaaggctacaaacccggtagccacagaggagtacgggaccgtttccagcaacctgcaatcttctactaccaatcccaccacagaatctgtcaacaaccagggaatactgcctggtatggtttggcaggaccgggacgtgtacctgcagggtcccatttgggccaaaattcctcacacggatggacactttcacccgtctcccctggtgggcggctttggactgaagcacccgcctccccagattctcatcaaaaacaccccggtacctgcgaatcctccagagactttcaccacttccaagtttgccagctacataacgcagtacagcactgggcaggtcagcgtggaaattgaatgggagctgcagaaggaaaacagcaagcgctggaacccagagatccagtacacttccaactacgcgaaatccaacaatgtggagttctccgtggatgcagccggtgtttattctgaaccccgccctattggtactcgttacctcacccgtaatctgtaa

SEQ ID NO: 261 - DNA, 2220 bp, Adeno-Associated Virus
  source 1..2220: mol_type = other DNA; note = BCD_0296
atggctgctgacggttatcttccagattggctcgaggacaacctctctgaaggcatccgcgagtggtgggcgctgaaacctggagcccccaagcctaaagcgaatcaacaacatcaggacaacagcaggggtcttgtgcttcctgggtacaagtacctcggacccttcaacggactcgacaagggagagccggtcaacgaggcggacgccgcggccctcgagcacgacaaggcctacgacaagcagctcgagcagggggacaacccgtacctcaagtacaaccacgcggacgccgagtttcaggagcgtcttcaagaagatacgtcttttgggggcaacctcgggcgagcagtcttccaggccaaaaagaggattctcgagcctctgggtctggttgaggaagcggctaagacggctcctggaaagaagcgacctctagagaaaacccccaaccggcccacggacactcaggccgccgggcagactccagccaaaaaaaggccacagggcgagcaatctggcgactccgctagacgacagctcgactttgatccacaaccagcagctcccatcggacaaccccccgcagccccctctcctgtgggatctaatacaatggcttcaggtggtggcggaccaatggcagacgataaccaaggcgccgacggagtgggtaatgcctcgggaaattggcattgcgattccacatggctgggcgacagagtcatcaccaccagcacccgaacctgggtcctgcccacctacaacaaccacatctacaagcaaatctccagcgaatcgggagccaccaacgacaaccactacttcggctacagcaccccctgggggtattttgacttcaacagattccactgccacttctcaccacgtgactggcagcgactcatcaacaacaactggggattccgacccaagcgactcaacttcaagatcttcaacatccaggtcaaagaagtcacgcagatcgagggcggctcgaccatcgccaataaccttaccagcacgattcaggtctttgcggattcggagtaccagctgccctacgtcctcggatcggctcaccagggctgcctcccgccgttcccggccgatgtcttcatgattccccagtacggatacctgactctgaacaacggtagccaatcagtgggacgttcttccttttactgcctggaatatttcccatcccagatgctgagaactggaaacaactttcaattcagctatacctttgaaagcgtgcctttccacagcagctacgcgcacagccagagcctggaccgcatcatgaaccccctggtggaccagtacctgtactacctggccagaactcagacgggtaccggaagcaccaccagcaacacgcggcagctgcagttttaccaggccgggccttccaacatggctgaccaatccaggaactggttgcctgggcccatgtaccggcagcagcgggtctccaagactctggaccaaaacagcaacaccaactttgcctggacggctgccagcaaatacaacctgaatggacgcaaatcattggctaatcctggtattgccatggcgactcacaaggacgatgaggagcgcttcttccctcagcacgaggttctggtgtttggacagacaaatgctaccaacaagacaactttggacaatgttttaattactagtgaagaagaaattaaggctactaacccggtagctacagaggagtacgggactgtttctagcaacctgcaatccggttccaccaaccccaccacagaatctgtcaacaaccagggaatactgcctggtatggtctggcaggaccgggacgtgtacctgcagggtcccatttgggccaagattcctcacacggacggacattttcacccgtctcccctgatgggcggctttggactgaagcacccgcctccccaaattctcatcaaaaacaccccggtacctgcgaatcctccagagacttttaccacttccaagtttgccagctacatcacgcagtacagcaccgggcaggtcagcgtggaaattgaatgggagctgcagaaggaaaacagcaagcgctggaacccagagattcagtatacttccaactacgcgaaatccaacaatgttgagttctccgtggatgcagccggtgtttattctgaaccccgccctattggtactcgttacctcacccgtaatctgtaa

SEQ ID NO: 262 - DNA, 2220 bp, Adeno-Associated Virus
  source 1..2220: mol_type = other DNA; note = BCD_0297
atggctgctgacggttatcttccagattggctcgaggacaacctctctgaaggcatccgcgagtggtgggcgctgaaacctggagcccccaagcctaaagcgaatcaacaacatcaggacaacagcaggggtcttgtgcttcctgggtacaagtacctcggacccttcaacggactcgacaagggagagccggtcaacgaggcggacgccgcggccctcgagcacgacaaggcctacgacaagcagctcgagcagggggacaacccgtacctcaagtacaaccacgcggacgccgagtttcaggagcgtcttcaagaagatacgtcttttgggggcaacctcgggcgagcagtcttccaggccaaaaagaggattctcgagcctctgggtctggttgaggaagcggctaagacggctcctggaaagaagcgacctctagagaaaacccccaaccagcccacggacactcaggccgccgggcagactccagccaaaaaaaggccacagggcgagcaatctggcgactccgctagacgacagctcgactttgatccacaaccagcagctcccatcggacaaccccccgcagccccctctcctgtgggatctagtacaatggcttcaggtggtggcggaccaatggcagacgataaccaaggcgccgacggagtgggtaatgcctcgggaaattggcattgcgattccacatggctgggcgacagagtcatcaccaccagcacccgaacctgggtcctgcccacctacaacaaccacatctacaagcaaatctccagcgaatcgggagccaccaacgacaaccactacttcggctacagcaccccctgggggtattttgacttcaacagattccactgccacttctcaccacgtgactggcagcgactcatcaacaacaactggggattccgacccaagcgactcaacttcaagatcttcaacatccaggtcaaagaagtcacgcagatcgagggcggctcgaccatcgccaataaccttaccagcacgattcaggtctttgcggattcggagtaccagctgccctacgtcctcggatcggctcaccagggctgcctcccgccgttcccggccgatgtcttcatgattccccagtacggatacctgactctgaacaacggcagccaatcagtgggacgttcttccttttactgcctggaatatttcccatcccagatgctgagaactggaaacaactttcaattcagctatacctttgaaagcgtgcctttccacagcagctacgcgcacagccagagcctggaccgcatcatgaaccccctggtggaccagtacctgtactacctggccagaactcagacgggtaccggaagcaccaccagcaacacgcggcagctgcagttttaccaggccgggccttccaacatggctgaccaatccaggaactggttgcctgggcccatgtaccggcagcagcgggtctccaagactctggaccaaaacagcaacaccaactttgcctggacggctgccagcaaatacaacctgaatggacgcaaatcattggctaatcctggtattgccatggcgactcacaaggacgatgaggagcgcttcttccctcagcacggggttctggtgtttggacagacaaatgctaccaacaagacaactttggacaatgttttaattactagtgaagaagaaattaaggctactaacccggtagctacagaggagtacgggactgtttctagcaacctgcaatccggttccaccaaccccaccacagaatctgtcaacaaccagggaatactgcctggtatggtctggcaggaccgggacgtgtacctgcagggtcccatttgggccaagattcctcacacggacggacattttcacccgtctcccctgatgggcggctttggactgaagcacccgcctccccaaattctcatcaaaaacaccccggtacctgcgaatcctccagagacttttaccacttccaagtttgccagctacatcacgcagtacagcaccgggcaggtcagcgtggaaattgaatgggagctgcagaaggaaaacagcaagcgctggaacccagagattcagtatacttccaactacgcgaaatccaacaatgttgagttctccgtggatgcagccggtgtttattctgaaccccgccctattggtactcgttacctcacccgtaatctgtaa

SEQ ID NO: 263 - DNA, 2220 bp, Adeno-Associated Virus
  source 1..2220: mol_type = other DNA; note = BCD_0298
atggctgctgacggttatcttccagattggctcgaggacaacctctctgaaggcattcgcgagtggtgggcgctgaaacctggagcccctcaacccaaggccaaccaacagcatcaggacaacggcaggggtcttgtgcttcctgggtacaagtacctcggacccttcaacggactcgacaagggagagccggtcaacgaggcagacgccgcggcgctcgagcacgacaaggcatacgacaagcagctcgagcagggggacaacccgtacctcaagtacaaccacgcggacgccgagtttcaggagcgtcttcaagaagatacgtcttttgggggcaacctcgggcgagcagtcttccaggccaaaaagaggattctcgagcctctgggtctggttgaggaagcggctaagacggctcctggaaagaagcgacctctagagaaaacccccaaccagcccacggacacccaggccgccgggcagactccagccaagaaaaggccacagggcgagcaatctggcgactccgctagacggcagctcgactttgatccacaaccagcagctcccatcggacaaccccccgcagccccctctcctgtgggatctaatacaatggcttcaggtggtggcggaccaatggcagacgataaccaaggcgccgacggagtgggtaatgcctcgggaaattggcattgcgattccacatggctgggcgacagagtcatcaccaccagcacccgaacctgggtcctgcccacctacaacaaccgcatctacaagcaaatctccagcgaatcgggagccaccaacgacaaccactacttcggctacagcaccccctgggggtattttgacttcaacagattccactgccacttttcaccacgtgactggcagcgactcatcaacaacaactggggattccggcccaagcgactcaacttcaagatcttcaacatccaggtcaaagaagtcacgcagatcgagggcggctcgaccatcgccaataaccttaccagcacgattcaggtctttgcggactcggagtaccagctgccctacgtcctcggatcggctcaccggggctgcctcccgccgttcccggccgatgtcttcatgattcctcagtacggatacctgactctaaacaacggcagccaatcagtgggacgctcttccttttactgcctggaatacttcccatcccagatgctgagaactggaaacaactttcaattcagctatacctttgaaagcgtgcctttccacagcagctacgcgcacagccagagcctggaccgcatcatgaaccccctggtggaccagtacctgtactacctggccagaactcaaacgggtaccggaagcaccaccagcaacacgcggcagctgcagttttaccaggccgggccttccaacatggctgaccaatccaggaactggttgcctgggcccatgtaccggcagcagcgggtctccaagactctggaccaaaacagcaacaccaactttgcctggacggctgccagcaaatacaacctgaatggacgcaagtcattggctaatcctggcattgccatggcgactcacaaggacgacgaggagcgcttcttccctcagcatggggttctggtgtttggacaaacaaatgctacgaacaagaccactttggacaacgtgttgattactagcgaagaggaaattaaggctacaaacccggtagccacagaggagtacgggaccgtttccagcaacctgcaatcttctactaccaatcccaccacagaatctgtcaacaaccagggaatactgcctggtatggtttggcaggaccgggacgtgtacctgcagggtcccatttgggccaaaattcctcacacggatggacactttcacccgtctcccctgatgggcggctttggactgaagcacccgcctccccagattctcatcaaaaacaccccggtacctgcgaatcctccagagactttcaccacttccaagtttgccagctacataacgcagtacagcactgggcaggtcagcgtggaaattgaatgggagctgcagaaggaaaacagcaagcgctggaacccagagatccagtacacttccaactacgcgaaatccaacaatgtggagtcctccgtggatgcagccggtgtttattctgaaccccgccctattggtactcgttacctcacccgtaatctgtaa

SEQ ID NO: 264 - DNA, 2220 bp, Adeno-Associated Virus
  source 1..2220: mol_type = other DNA; note = BCD_0299
atggctgctgacggttatcttccagattggctcgaggacaacctctctgaaggcattcgcgagtggtgggcgctgaaacctggagccccacaacccaaggccaaccaacagcatcaggacaacggcaggggtcttgtgcttcctgggtacaagtacctcggacccttcaacggactcgacaagggagagccggtcaacgaggcagacgccgcggccctcgagcacgacaaggcctacgacaagcagctcgagcagggggacaacccgtacctcaagtacaaccacgcggacgccgagtttcaggagcgtcttcaagaagatacgtcttttgggggcaacctcgggcgagcagtcttccaggccaaaaagaggattctcgagcctctgggtctggttgaggaagcggctaagacggctcctggaagaaagcgacctctagagaaaactcccaaccagcccacggacacccaggccgccgggcagactccagccaagaaaaggcagcagggcgagcaatctggcgactccgctagacggcagctcgactttgatccacagccagcagctcccatcggacaaccccccgcagccccctctcctgtgggatctaatacaatggcttcaggcggtggcggaccaatggcagacgataaccaaggcgccgacggagtgggtaatgcctcgggaaattggcattgcgattccacatggctgggcgacagagtcatcaccaccagcacccgaacctgggtcctgcccacctacaacaaccacatctacaagcaaatctccagcgaatcgggagccaccaacgacaaccactacttcggctacagcaccccctgggggtattttgacttcaacagattccactgccacttttcaccacgtgactggcagcgactcatcaacaacaactggggattccggcccaagcgactcaacttcaagatcttcaacatccaggtcaaagaagtcacgcagatcgagggcggctcgaccatcgccaataaccttaccagcacgattcaggtctttgcggactcggagtaccagctgccctacgtcctcggatcggctcaccagggctgcctcccgccgttcccggccgatgtcttcatgattccccagtacggatacctgactctgaacaacggcagccaatcagtgggacgctcttccttttactgcctggaatatttcccatcccagatgctgggaactggaaataactttcaattcagctacacctttgaaagcgtgcctttccacagcagctacgcacacagccagagcctggaccgcatcatgaaccccctggtggaccagtacctgtactacttggccagaactcagacgggtaccggaagcaccaccagcaacacgcggcagctgcagttttaccaggccgggccttccaacatggctgaccaatccaggaactggttgcctgggcccatgtaccggcagcagcgggtctccaagactctggaccaaaacagcaacaccaactttgcctggacggctgccagcaaatataacctgaatggacgcaaatcattggttaatcctggcatttccatggcgacccacaaggatgacgaggagcgcttcttccctcagcacggggtcctggtctttggacagacaaacgccaccaacaaaaccaccctggacaacgtcctgattactgacgaggaagaagtcaaggcgaccaatccggtggccacagaggaatacgggactgtttccagcaacctgcaatctggctccactaatcccaccacagagactgtcaacaaccagggaatacttcctggtatggtttggcaggaccgggacgtgtacctgcagggtcccatttgggccaaaattcctcacacggatggacactttcacccgtctcccctgatgggcggctttggactgaagcacccgcctccccagattctcatcaagaacaccccggtacctgcgaatcctccagagacttttaccacttccaagtctgccagctacatcacgcagtacagcaccgggcaggtcagcgtggaaatcgaatgggagctgcagaaggaaaacagcaagcggtggaacccagagatccagtacacttccaactacgcgaaatccaacaatgtggaattctccgtggatgcagccggtgtttattctgaaccccgccctattggtactcgttacctcacccgtaatctgtaa

SEQ ID NO: 265 - DNA, 2220 bp, Adeno-Associated Virus
  source 1..2220: mol_type = other DNA; note = BCD_0300
atggctgctgacggttatcttccagattggctcgaggacaacctctctgaaggcatttgcgagtggtgggcgctgaaacctggagccccacaacccaaggccaaccaacagcatcaggacaacggcaggggtcttgtgcttcctgggtacaagtacctcggacccttcaacggactcgacaagggagagccggtcaacgaggcagacgccgcggccctcgagcacgacaaggcctacgacaagcagctcgagcagggggacaacccgtacctcaagtacaaccacgcggacgccgagtttcaggagcgtcttcaagaagatacgtcttttgggggcaacctcgggcgagcagtcttccaggccaaaaagaggattctcgagcctctgggtctggttgaggaagcggctaagacggctcctggaaaaaagcgacctctagagaaaactcccaaccagcccacggacacccaggccgccgggcagactccagccaagaaaaggcagcagggcgagcaatctggcgactccgctagacggcagctcgactttgatccacagccagcagctcccatcggacaaccccccgcagccccctctcctgtgggatctaatacaatggcttcaggcggtggcggaccaatggcagacgataaccaaggcgccgacggagtgggtaatgcctcgggaaattggcattgcgattccacatggctgggcgacagagtcatcaccaccagcacccgaacctgggtcctgcccacctacaacaaccacatctacaagcaaatctccagcgaatcgggagccaccaacgacaaccactacttcggctacagcaccccctgggggtattttgacttcaacagattccactgccacttttcaccacgtgactggcagcgactcatcaacaacaactggggattccggcccaagcgactcaacttcaagatcttcaacatccaggtcaaagaagtcacgcagatcgagggcggctcgaccatcgccaataaccttaccagcacgattcaggtctttgcggactcggagtaccagctgccctacgtcctcggatcggctcaccagggctgcctcccgccgttcccggccgatgtcttcatgattccccagtacggatacctgactctgaacaacggcagccaatcagtgggacgctcttccttttactgcctggaatatttcccatcccagatgctgagaactggaaataactttcaattcagctacacctttgaaagcgtgcctttccacagcagctacgcacacagccagagcctggaccgcatcatgaaccccctggtggaccagtacctgtactacttggccagaactcagacgggtaccggaagcaccaccagcaacacgcggcagctgcagttttaccaggccgggccttccaacatggctgaccaatccaggaactggttgcctgggcccatgtaccggcagcagcgggtctccaagactctggaccaaaacagcaacaccaactttgcctggacggctgccagcaaatataacctgaatggacgcaaatcattggttaatcctggcattcccatggcgacccacaaggatgacgaggagcgcttcttccctcagcacggggtcctggtctttggacagacaaacgccaccaacaaaaccaccctggacaacgtcctgattactgacgaggaagaagtcaaggcgaccaatccggtggccacaggggaatacgggactgtttccagcaacctgcaatctggctccactaatcccaccacagagactgtcaacaaccagggaatacttcctggtatggtttggcaggaccgggacgtgtacctgcagggtcccatttgggccaaaattcctcacacggatggacactttcacccgtctcccctgatgggcggctttggactgaagcacccgcctccccagattctcatcaagaacaccccggtacctgcgaatcctccagagacttttaccacttccaagtttgccagctacatcacgcagtacagcaccgggcaggtcagcgtggaaatcgaatgggagctgcagaaggaaaacagcaagcggtggaacccagagatccagtacacttccaactacgcgaaatccaacaatgtggagttctccgtggatgcagccggtgtttattctgaaccccgccctattggtactcgttacctcacccgtaatctgtaa

SEQ ID NO: 266 - DNA, 2220 bp, Adeno-Associated Virus
  source 1..2220: mol_type = other DNA; note = BCD_0301
atggctgctgacggttatcttccagattggctcgaggacaacctctctgaaggcattcgcgagtggtgggcgctgaaacctggagccccacaacccaaggccaaccaacagcatcaggacaacggcaggggtcttgtgcttcctgggtacaagcacctcggacccttcaacggactcgacaagggagagccggtcaacaaggcagacgccgcggccctcgagcacgacaaggcctacgacaagcagctcgagcagggggacaacccgtacctcaagtataaccacgcggacgccgagtttcaggagcgtcttcaagaagatacgtcttttgggggcaacctcgggcgagcagtcttccaggccaaaaagaggattctcgagcctctgggtctggttgaggaagcggctaagacggctcctggaaaaaagcgacctctagagaaaactcccaaccagcccacggacacccaggccgccgggcagactccagccaagaaaaggcagcagggcgagcaatctggcgactccgctagacggcagctcgactttgatccacagccagcagctcccatcggacaaccccccgcagccccctctcctgtgggatctaatacaatggcttcaggcggtggcggaccaatggcagacgataaccaaggcgccgacggagtgggtaatgcctcgggaaattggcattgcgattccacatggctgggcgacagagtcatcaccaccagcacccgaacctgggtcctgcccacctacaacaaccacatctacaagcaaatctccagcgaatcgggagccaccaacgacaaccactacttcggctacagcaccccctgggggtattttgacttcaacagattccactgccacttttcaccacgtgactggcagcgactcatcaacaacaactggggattccggcccaagcgactcaacttcaagatcttcaacatccaggtcaaagaagtcacgcagatcgagggcggctcgaccatcgccaataaccttaccagcacgattcaggtctttgcggactcggagtaccagctgccctacgtcctcggatcggctcaccagggctgcctcccgccgttcccggccgatgtcttcatgattccccagtacggatacctgactctgaacaacggcagccaatcagtgggacgctcttccttttactgcctggaatatttcccatcccagatgctgagaactggaaataactttcaattcagctacacctttgaaagcgtgcctttccacagcagctacgcacacagccagagcctggaccgcatcatgaaccccctggtggaccagtacctgtactacttggccagaactcagacgggtaccggaagcaccaccagcaacacgcggcagctgcagttttaccaggccgggccttccaacatggctgaccaatccaggaactggttgcctgggcccatgtaccggcagcagcgggtctccaagactctggaccaaaacagcaacaccaactttgcctggacggctgccagcaaatataacctgaatggacgcaaatcattggttaatcctggcatttccatggcgacccacaaggatgacgaggagcgcctcttccctcagcacggggtcctggtctttggacagacaaacgccaccaacaaaaccaccctggacaacgtcctgattactgacgaggaagaagtcaaggcgaccaatccggtggccacagaggaatacgggactgtttccagcaacctgcaatctggctccactaatcccaccacagagactgtcaacaaccagggaatacttcctggtatggtttggcaggaccgggacgtgtacctgcagggtcccatttgggccaaaattcctcacacggatggacactttcacccgtctcccctgatgggcggctttggactgaagcacccgcctccccagattctcatcaagaacaccccggtacctgcgaatcctccagagacttttaccacttccaagtttgccagctacatcacgcagtacagcaccgggcaggtcagcgtggaaatcgaatgggagctgcagaaggaaaacagcaagcggtggaacccagagatccagtacacttccaactacgcgaaatccaacaatgtggagttctccgtggatgcagccggtgtttattctgaaccccgccctattggtactcgttacctcacccgtaatctgtaa

SEQ ID NO: 267 - DNA, 2181 bp, Adeno-Associated Virus
  source 1..2181: mol_type = other DNA; note = BCD_0351
atgtcgtttgttgatcaccctccagattggttggaagaggttggtgaaggccttcacgagtttttggagctcgaagctggcccacccaaaccgaagcccaaccagcagaagcaggacaacgcccgtggtcttgtactgcctggatataattatctgggacccttcaacggactcgacaagggagagcccgtcaaccgagcggacgctgttgcgcgagagcacgacatctcgtacaacgagcagctccaggcgggagacaacccctacctcaagtacaaccacgcggacgccgagtttcaagagaagcttaaggacgacacctcctttgggggcaacctcggcaaggcgatctttcaggccaagaaaagggttcttgaaccttttggcctggttgaggcacctgttaagacggctccagccaagaagcggccgatagagaagtctccggcggaaccgagctcttcgaagggcatcggcaaggcgggccagcagcctgcgagaaagcgactcaactttggtcagactggagacgccgactccgccgctgacccccagcctctcggagaaccacccgcagccccctctggtctgggaactggtacgatggcttcaggcagtggcgcaccaatggcagacaataacgaaggcgccgacggagtgggtaatgcctcgggaaattggcattgcgattccacatggctgggcgaccgagtcatcaccaccagcacccgcacctgggccctgcccacctacaacaatcacctctacaagcaaatctccagccagtctggagccagcaatgacaatcactactttggatatagcaccccctgggggtactttgacttcaaccgcttccactgccacttctcgccgcgagactggcagcgactcatcaacaacaactggggattccgacccaagcgactcaacttcaagctgtttaacatccaagtcaaggaagtcactcagacggacggtacgaagaccatcgccaataaccttaccagcacggttcaggtctttgcggactcggagtaccagctcccatacgtcctcggatcggcgcaccagggctgcttcccgccgttcccggcggacgtcttcatggtcccacaatacgggtacctcaccctgaacaacggcagccaggcgatgggccgttcgtccttctactgcttggagtactttccgtcgcagatgctgcggacgggaaacaacttcacgttcagctacaccttcgaggacgtgcccttccacagcagctacgcgcacagccagagcctggaccggctgatgaacccgctcatcgaccagtacctgtactacctgagcaagacacagaacggcttgggcttttctcaggcgggacccaccagcatgcgggaccagtctaggaactggctgccggggccttgcttcagacagcagcgaatatcgaaaacgcctacgcaaaataatactggagactttgcgtggacaggaaccacaaggtaccatcttaacggtcgagactcggtgatgaatccgggcccggccatggccagtcacaaggatgacgaagacaggttcttccctcaaaacggtgtactcatttttggaaaacaaggtgcagaaaaaaacaacgcggtgcttgacaaagtgatcatcactgacgaggaggaaatcagaaccacgaaccctgttgccacggaagaatatgggctcgttgctaccagcctccaaaacaatacaaccacggcagataccgagagggtcaacgcacagggcattctacccggcatggtgtggcaagaccgagacgtgtatctgcaaggacccatctgggccaagattccctacacggacggacacttccatccctcgccgctcatgggcgggttcggtctcaagcgtccgcctccgcaaatcctcatcaagaacacccccgtaccagcggatcccgccacgaccttcaacccggcgaagctagcgtccttcatcacgcagtactctacgggacaggtcagcgtggagatcgagtgggagctgcagaaggagaacagcaagcgctggaaccccgaggtccagtacacctccaactacaacaagtctgtcaatgtggacttcaccgtagacaccaacggcatgtactcggagccgcgaaccatcggcacccgctaccttacccgcaacctgtaa

SEQ ID NO: 268 - DNA, 2181 bp, Adeno-Associated Virus
  source 1..2181: mol_type = other DNA; note = BCD_0353
atgtcgtttgttgatcaccctccagattggttggaagaggttggtgaaggccttcacgagtttttggagctcgaagctggcccacccaaaccgaagcccaaccagcagaagcaggacaacgcccgtggtcttgtactgcctggatataattatctgggacccttcaacggactcgacaagggagagcccgtcaaccgagcggacgctgttgcgcgagagcacgacatctcgtacaacgagcagctccaggcgggagacaacccctacctcaagtacaaccacgcggacgccgagtttcaggagaaactcaaggacgacacctccttcgggggcaacctcggaaaggcaatctttcaggccaagaaaagggttctcgaaccttttggcctggttgaggcgcctgttaagacggctccagccaagaagcggccgatagagaagtctccggcggaaccgagctcttcgaagggcatcggcaaggcgggccagcagcctgcgagaaagcggctcaactttggtcagactggagacaccgactccgccgctgacccccagcctctcggagaaccacccgcagccccctctggtctgggaactggtacgatggcttcaggcggtggcgcaccaatggcagacaataacgaaggcgccgacggagtgggtaatgcctcgggaaattggcattgcgattccacatggctgggcgaccgagtcatcaccaccagcacccgcacctgggccctgcccacctacaacaaccacctctacaagcagatctccagccagtctggagccagcaatgacaaccactactttggatatagcaccccctgggggtactttgacttcaaccgcttccactgccacttttccccgcgagactggcagcggctcatcaacaacaactggggattccgacccaagcgactcaacttcaagctgtttaacatccaagtcaaggaggtcactcagacggacggcacgaagaccatcgctaataaccttaccagcacggttcaggtctttgcggactcggagtaccagctcccatacgtcctcggatcggcgcaccagggctgcttcccgccgttcccggcggacgtcttcatggtcccgcagtacgggtatctgacgctgaacaacggcagccaagcgatgggccgttcgtccttctactgcctggagtactttccgtcgcagatgctgcggacgggaaacaacttcacgttcagctacaccttcgaggatgttcccttccacagcagctacgcgcacagccagagcctggaccggctcatgaacccgctgatcgaccagtacctgtactacctgagcaaaacgcagaacggcttgggcttttctcaagcgggaccctcgagcatgcgggaccagtccaggaactggctgccggggccttgcttcagacagcagcggatctcgaaaacgcctacacaaaataacactggagactttgcgtggacaggaaccacgaggtaccacctcaacggtcgagactcggtgatgaacccgggtccggctatggccagccacaaagatgacgaagacagattcttccctcaaaacggtgtactcatttttggaaaaaaagatgcagaaaaaaacaatgcggtacttgacaaggtgatcatcactgacgaggaggaaatcagaaccacgaaccctgttgccacggaagaatacgggctcgttgctaccagcctccaaaacaatacaaccgcagcagatacagagagggttaatgcacaaggaatccttcccggcatggtgtggcaagaccgagacgtgtatctgcaaggacccatctgggccaagattccctacacggacggacacttccatccctcgccgctcatgggcgggttcggcctcaagcgccctcctccgcaaatcctcatcaagaacacccccgtaccagcggatcccgccacgaccttcaacccggcgaagctagcgtccttcatcacgcagtactccacgggccaggtcagcgtggagatcgagtgggagctgcagaaggagaacagcaagcgctggaatcccgaggtccagtacacgtccaactacaacaagtccgtcaatgtggaattcaccgtggacaacaacggcgtgtactcggaaccccgcaccatcggaacccgctaccttacccgcaacctgtaa

SEQ ID NO: 269 - DNA, 2184 bp, Adeno-Associated Virus
  source 1..2184: mol_type = other DNA; note = BCD_0354
atgtcgtttgttgatcaccctccagattggttggaagaggttggtgaaggccttcacgagtttttggagctcgaagctggcccacccaaaccgaagcccaaccagcagaagcaggacaacgcccgtggtcttgtactgcctggatataattatctgggacccttcaacggactcgacaagggagagcccgtcaaccgagcggacgctgttgcgcgagagcacgacatctcgtacaacgagcagctccaggcgggagacaacccctacctcaagtacaaccacgcggacgccgagtttcaagagaagcttaaggacgacacctcctttgggggcaacctcggcaaggcgatctttcaggccaagaaaagggttcttgaaccttttggcctggttgaggcacctgttaagacggctccagccaagaagcggccgatagagaagtctccggcggaaccgagctcttcgaagggcatcggcaaggcgggccagcagcctgcgagaaagcgactcaactttggtcagactggagacgccgactccgccgctgacccccagcctctcggagaaccacccgcagccccctctggtctgggaactggtacgatggcttcaggcagtggcgcaccaatggcagacaataacgaaggcgccgacggagtgggtaatgcctcgggaaattggcattgcgattccacatggctgggcgaccgagtcatcaccaccagcacccgcacctgggccctgcccacctacaacaaccatctctacaagcaaatctcctctagcagtttcggagccacaaatgacgaccactactttggctatagcaccccctgggggtactttgacttcaaccgcttccactgccacttctccccgcgagactggcagcggctcatcaacaacaactgggggttccgtcccaagcggctcaacttcaagctgttcaacatccaagtcaaggaggtcacggacacggacggtacgaagacaatcgccaataaccttaccagcacggttcaggtctttgcggattcggagtaccagctgccgtatgtcctcggatcggcacaccagggctgcttcccaccgttcccggcggacgtctttatgatcccgcagtatgggtacctgacgctgaacaacggcagccaggcgatgggccgctcgtccttctattgcctagagtactttccgtcgcaaatgctgcggacggggaacaacttcacgttcagctacacatttgaggacgtgcccttccacagcagctacgcgcacagtcagagtctggaccggctgatgaatccgcttatcgaccagtacctgtactacctgagcaagacaaatggcggtctggcgttttctcaagcaggacacaccaacatgcggaaccagtccaggaactggctcccgggaccctgcttccgacagcagcggatatcaaaaacacctacagaaaacaataaccaagagttctcttggacgggggctacgaaatatcacctcaacggaagagactctgtgatgaacccgggtccggccatggccagtcacaaggacgacgagaacagattctttccgcaaaacggagtgctcatctttgggacaccgaacgctgctgcaaccaatgcacaactaggcgatgtactgatcacagatgaggaggaaatcagaactacgaacccagtggccacagaagagtacggcatcgttgccaataacaaacagagctccagcatacaggcaacgaccacgaatgtcaatgcgcaaggcatcctgccaggcatggtgtggcaggaccgagacgtgtacctacaggggcccatctgggctaagatcccccacacggatggacacttccacccatcaccgctcatgggcgggttcggccttaagcatccacctccgcagatcctcatcaagaatactcctgtgccgtcgaaccctccagaaacgttcaagcaggaaaagctcaatgccttcatcacgcagtactccacgggccaggtcagcgtggagatcgagtgggagctgcagaaggaaaacagcaagcgctggaaccccgaggtccagtacacgtccaattacaacaagtccgtcaacgtggactttaccgtggacaccaacggcgtgtactcggaaccgcgcaccatcggcacccgctaccttacccgcaacctgtaa

SEQ ID NO: 270 - DNA, 2184 bp, Adeno-Associated Virus
  source 1..2184: mol_type = other DNA; note = BCD_0359
atgtcgtttgttgatcaccctccagattggttggaagaggtcggtgaaggccttcacgagtttttggagctcgaagctggcccacccaaaccgaagcccaaccagcagaagcaggacaacgcccgtggtcttgtactgcctggatataattatctgggacccttcaacggactcgacaagggagagcccgtcaaccgagcggacgctgttgcgcgagagcacgacatctcgtacaacgagcagctccaggcgggagacaacccctacctcaagtacaaccacgcggacgccgagtttcaggagaagctcaaggacgacacctcctttgggggcaacctcggaaaggcagtctttcaggccaagaaaagggttctcgaaccttttggcctggttgaggcacctgttaagacggctccagccaagaagcggccgatagaaaagtctccggcggaaccgagctcttcgaaaggcatcggcaaggcgggccagcagcctgcgagaaagcgactcaactttggtcagactggagacgccgactccgcccctgacccccagcctctcggagaaccacctgcagccccctctggtctgggaactggtacgatggcttcaggcagtggcgcaccaatggcagacaataacgaaggcgccgacggagtgggtaatgcctcgggaaattggcattgcgattccacatggctgggcgaccgagtcatcaccaccagcacccgcacctgggccctgcccacctacaacaaccacctctacaagcaaatctcctctagcagtttcggagccaccaacgacaaccactactttggctacagcaccccctgggggtactttgacttcaaccgcttccactgccatttctcacctcgagactggcagcggctcatcaacaacaactgggggttccggcctaagcggctcaacttcaagctgttcaacatccaagtcaaggaggtcacggagaatgacggcaccaagaccatcgccaataaccttaccagcacggttcaggtctttgcggactcggagtaccagctgccgtacgtcctcggatcggcgcaccagggctgcttcccgccgttcccggcggacgtcttcatggtcccgcagtacgggtacctgacgctgaacaacgggagccaggcgatgggtcgctcgtccttctactgcttggagtactttccgtcgcagatgctgcggacgggaaacaacttcacattcagctacaccttcgaggacgtgcccttccacagcagctatgcgcacagccagagtctggaccggctgatgaatccgctcatcgaccagtacctgtactacctgagcaagacagcaggtggtctggcgttttctcaagcgggacccaccagcatgcgagatcagtctaggaactggctcccggggccctgctttcgtcaacagcggatctcgaagacacccacagaaaacaataaccaagagttctcctggacgggggctacgaagtatcacctcaatggaagagactctgtgatgaacccgggcccggccatggccagtcacaaagacgacgagaacagattctttccgcaaaacggcgtgctcatttttgggacaccgaacgctaatgcaaccaatgcacaactaaacgatgtactgatcaccgatgaggaggaaatcagaactacgaaccctgtggccacagaagagtacggcatcgttgccaataacaaacagagctccagcatacaggctacgaccacaaatgtcaatgcgcaaggcatccttccaggcatggtgtggcaggaccgagacgtgtacctgcagggacccatctgggccaagatcccccacacggatggacacttccacccctcgccgctcatgggcgggttcggccttaagcatccacctccgcagatcctcatcaagaatacgcctgtgccgtcgaaccctccagaaacgttcaagcaggacaagctcaatgccttcatcacgcagtactccacgggacaggtcagcgtggagatcgagtgggagctgcagaaggagaacagcaaacgatggaaccccgaggtccagtacacgtccaattacaacaagtctgttaatgtggacttcaccgtggacaccaacggtgtgtactcggaaccgcgcaccatcggcacccgataccttacccgcaacctgtaa

SEQ ID NO: 271 - DNA, 2187 bp, Adeno-Associated Virus
  source 1..2187: mol_type = other DNA; note = BCD_0360
atgtcgtttgttgatcaccctccagattggttggaagaggtcggtgaaggccttcacgagtttttggagctcgaagctggcccacccaaaccgaagcccaaccagcagaagcaggacaacgcccgtggtcttgtactgcctggatataattatctgggacccttcaacggactcgacaagggagagcccgtcaaccgagcggacgctgttgcgcgagagcacgacatctcgtacaacgagcagctccaggcgggagacaacccctacctcaagtacaaccacgcggacgccgagtttcaggagaagctcaaggacgacacctcctttgggggcaacctcggaaaggcaatctttcaggccaagaaaagggttctcgaaccttttggcctggttgaggcacctgttaagacggctccagccaagaagcggccgatagaaaagtctccggcggaaccgagctcttcgaaaggcatcggcaaggcgggccagcagcctgcgagaaagcgactcaactttggtcagactggagacaccgactccgccgctgacccccagcctctcggagaaccacccgcagccccctctggtctgggaactggtacgatggcttcaggcagtggcgcaccaatggcagacaataacgaaggcgccgacggagtgggtaatgcctcgggaaattggcattgcgattccacatggctgggcgaccgagtcatcaccaccagcacccgcacctgggccctgcctacctacaacaaccacctctacaagcagatctccagccagactggaggcggagccaacaacgacaaccactactttggctacagcaccccctgggggtactttgacttcaatcgcttccactgccacttctcgccgcgagactggcagcgactcatcaacaacaactggggattccggcccaagcgactcaacttcaagctgttcaacatccaggtcaaggaggtcacggagaatgaaggcacgaaaacgatcgccaataaccttaccagcacggttcaggtctttgcggactcggagtaccagctaccgtacgtcctcggatcggcgcatcagggatgcttcccgccgttcccggcggacgtcttcatgatcccgcagtacgggtacctgacgctgaataatggcagccaggcaatgggccgttcgtctttctactgcctggagtactttccgtcgcagatgctgcggacggggaacaacttcacgttcagctacaccttcgaggacgtgcccttccacagcagctacgcccacagtcagagtctggaccggctcatgaacccgctcatcgaccagtatctatactacctgagtaagacgcagaacggcttgggcttttctcaagcggggccctccagcatgcgggaccagtccagaaactggctcccggggccctgcttccgtcaacagcggatctctaagacatctacagaaaataacaacggagaattctcgtggacgggggccacaaagtatcacctcaacggcagagactctgtgatgaatcccggtccggccatggccagccacaaagacgatgaggacagattcttccctcagaacggtgtgctcatatttggaaaacaaggctcgaatgcgagtaatgtacaactggataaggtgttgatcacagacgaagaagagattaggactacgaaccccgtggctacagaggaatacggattcgtcgctaccagcctccaaaatggaaacaccacagcggataccacgagggtcaacgcgcagggcatcctacctggcatggtgtggcaagatagagacgtatacctgcaagggcccatctgggccaagattccttatacggacggacactttcatccctcgccactcatgggcgggtttgggctcaagcgtcctccgccgcagattctcatcaagaacacgcctgttcccggagatccgcccacgaccttcaaccaacagaagctcgcctccttcatcacacaatactccacgggtcaagtcagtgtggagatcgagtgggagctacagaaggaaaacagcaagcgctggaaccccgaggtccagtacacgtccaactacaacaagtccgtgaacgtggacttcaccgtgaatagcgatggcgtgtactcggaacctcgtaccattggaacccgctaccttacccgcaacctgtaa

SEQ ID NO: 272 - DNA, 2184 bp, Adeno-Associated Virus
  source 1..2184: mol_type = other DNA; note = BCD_0361
atgtcgtttgttgatcaccctccagattggttggaagaggtcggtgaaggccttcacgagtttttggagctcgaagctggcccacccaaaccgaagcccaaccagcagaagcaggacaacgcccgtggtcttgtactgcctggatataattatctgggacccttcaacggactcgacaagggagagcccgtcaaccgagcggacgctgttgcgcgagagcacgacatctcgtacaacgagcagctccaggcgggagacaacccctacctcaagtacaaccacgcggacgccgagtttcaggagaagctcaaggacgacacctcctttgggggcaacctcggaaaggcagtctttcaggccaagaaaagggttctcgaaccttttggcctggttgaggcacctgttaagacggctccagccaagaagcggccgatagaaaagtctccggcggaaccgagctcttcgaaaggcatcggcaaggcgggccagcagcctgcgagaaagcgactcaactttggtcagactggagacgccgactccgcccctgacccccagcctctcggagaaccacccgcagccccctctggtctgggaactggtacgatggcttcaggcagtggcgcaccaatggcagacaataacgaaggcgccgacggagtgggtaatgcctcgggaaattggcattgcgattccacatggctgggcgaccgagtcatcaccaccagcacccgcacctgggccctgcccacctacaacaaccacctctacaagcaaatctcctctagcaattacggagccaacaacgacaaccactactttggctacagcaccccctgggggtactttgacttcaaccgcttccactgccacttctcgcctcgagactggcagcgactcatcaacaacaactggggattccgacccaagcgactcaacttcaagctgttcaacattcaagtcaaggaggtcacggaaacggacggcacgaagaccatcgccaataaccttaccagcacggttcaggtctttgcggattcggagtaccagctcccgtacgtcctcggctcggcgcaccagggctgcttcccgccgttcccggcggacgtcttcatgatcccgcagtatggatacctgacgctgaacaatgggagccaggcgatgggccgctcgtccttctactgcctggagtactttccgtcgcagatgctgcggacggggaacaacttcacgttcagctacaccttcgaggacgtgcccttccacagcagctacgcacacagccagagcctggaccggctgatgaatccgctcatcgaccagtacctgtactacctgagcaagacagccggtggtctggcgttttctcaagcagggcccaccagcatgcggaaccagtccagaaactggctcccggggccctgcttccgtcagcagcgagtttcagaaagatcaacagaaaacaacaacggagacttctcgtggacagggaccacgagataccatctcaacggtagagactcggcgatgaatccgggcccggccatggccagtcacaaggacgacgaggacagattctttccgcaaaacggcgtgctcatctttggaacaccgaacgctactgcaagcaatgcacctctagataatgtattgatcaccgatgaggaggaaatcagaactacaaaccctgtggccacggaagagtacgggatcgttgctaacaacaaacaggacaacagtacacaggcgacgaccgcgattgtcaacgcacaaggcatcctgcccggcatggtgtggcaggatcgagatgtgtacctgcaggggcccatctgggccaagatcccccacacggatggacactttcacccatcaccgctcatgggcgggttcggtcttaagcatccacctccgcagatcctcatcaagaacacgcctgtgccgtcgaaccctccagaaaagttcacacaggaaaagctcaatgccttcatcacgcagtactctacgggacaggtcagtgtggagatcgagtgggagctgcagaaggagaacagcaagcgctggaaccccgaggtccagtacacctccaattacaacaagtcagtgaacgtggacttcaccgtggacaccaacggcatgtactcggaaccgcgcaccatcggcacccgataccttacccgcaacctgtaa

SEQ ID NO: 273 - DNA, 2184 bp, Adeno-Associated Virus
  source 1..2184: mol_type = other DNA; note = BCD_0362
atgtcgtttgttgatcaccctccagattggttggaagaggtcggtgaaggccttcacgagtttttggagctcgaagctggcccacccaaaccgaagcccaaccagcagaagcaggacaacgcccgtggtcttgtactgcctggatataattatctgggacccttcaacggactcgacaagggagagcccgtcaaccgagcggacgctgttgcgcgagagcacgacatctcgtacaacgagcagctccaggcgggagacaacccctacctcaagtacaaccacgcggacgccgagtttcaggagaagctcaaggacgacacctcctttgggggcaacctcggaaaggcaatctttcaggccaagaaaagggttctcgaaccttttggcctggttgaggcacctgttaagacggctccagccaagaagcggccgatagaaaagtctccggcggaaccgagctcttcgaaaggcatcggcaaggcgggccagcagcctgcgagaaagcgactcaactttggtcagactggagacaccgactccgccgctgacccccagcctctcggagaaccacccgcagccccctctggtctgggaactggtacgatggcttcaggcagtggcgcaccaatggcagacaataacgaaggcgccgacggagtgggtaatgcctcgggaaattggcattgcgattccacatggctgggcgaccgagtcatcaccaccagcacccgcacctgggccctgcctacctacaacaaccacctctacaagcaaatctccagtagtcaggccggagccagcaacgacaaccactactttggctacagcaccccctgggggtactttgacttcaaccgcttccactgccacttctccccgcgagactggcagcggctcatcaacaacaactgggggttccgtcccaagcggctcaacttcaagctgttcaacatccaagtcaaggaggttacggacacggaaggcacgaagaccatcgccaataaccttaccagcacggttcaggtctttgcggactctgagtaccagctgccgtatgtcctcgggtcggcgcaccagggctgcttcccgccattcccggcggacgtcttcatgatcccgcagtatggatacctgacgctgaacaatgggagccaggcgatgggccgctcgtccttctactgcctggagtactttccgtcgcagatgctgcggacggggaacaacttcacgttcagctacaccttcgaagatgtgcccttccacagcagctacgcgcacagccagagtctggaccggctgatgaacccgctcatcgaccagtacctgtactacctaagtaagacaaatggcggtctaggattttcccaagcggggccctcgagcatgcgcgatcagtccaggaattggctgccgggaccatgcttccgtcaacagcggatttcaaccgtacctacacaaaataacaacggagacttttcgtggacgggagccacaaagtatcatctcaatggtagaaactcggcgatgaacccgggcccggccatggctagccataaggacgacgagcacaggttcttccctcagaacggcgtgctcatctttggaaaacagggcgcagaaaaaaacaatgcgatactcgacaaggtaatcatcactgacgaggaggaggtcaggaccacaaaccctgtagccacggaggagtacggatttgtcgccactagtctacaaagctcgaccgaagcagccgagaccgcaagagtcaacgcgcaaggcatcctccctggcatggtgtggcaggatcgagatgtgtatctgcagggacccatctgggctaagattccccacacggacggacacttccacccatcgccgctcatgggcgggttcggcctcaagcgaccacctccacagatcctcatcaagaatacgccggtgccatcggaccctccattgaccttcaacccggcgaaactagcgtccttcatcacgcagtactccacgggacaggtcagcgtggagatcgagtgggagctgcagaaggagaacagcaaacgatggaaccccgaggtccagtacacgtccaattacaacaagtccgtcaacgtggaattcaccgtggacaacaacggtgtgtactcggaaccgcgcaccatcggcacccgataccttacccgcaacctgtaa

SEQ ID NO: 274 - DNA, 2211 bp, Adeno-Associated Virus
  source 1..2211: mol_type = other DNA; note = BCD_0386
atggctgccgatggttatcttccagattggctcgaggacaacctctctgagggcattcgcgagtggtgggacttgaaacctggagccccgaaacccaaagccaaccagcaaaagcaggacgacggccggggtctggtgcttcctggctacaagtacctcggacccttcaacggactcgacaagggggagcccgtcaacgcggcggacgcagcggccctcgagcacgacaaagcctacgaccagcagctcaaagcgggtgacaatccgtacctgcggtataatcacgccgacgccgagtttcaggagcgtctgcaagaagatacgtcttttgggggcaacctcgggcgagcagtcttccaggccaagaagcgggttctcgaacctctcggtctggttgaggaaggcgctaagacggctcctggaaagaagaggccggtagagcagtcgccacaagagccagactcctcctcgggcatcggcaagacaggccagcagcccgctaaaaagagactcaattttggtcagactggcgactcagagtcagtccccgacccacaacctctcggagaacctccagcagccccctcaggtgtgggatctaatacaatggcttcaggcggtggcgctccaatggcagacaataacgaaggcgccgacggagtgggtaattcctcgggaaattggcattgcgattccacatggctgggggacagagtcatcaccaccagcacccgaacctgggccctgcccacctacaacaaccacctctacaagcaaatctccaactccacctcgggaggaagctccaacgacaacacctattttggctacagcaccccctgggggtattttgacttcaacagattccactgtcacttttcaccacgtgactggcaacgactcatcaacaacaattggggattccggcccaaaagactcaacttcaagctgttcaacatccaggtcaaggaagtcacggacaacaatggagtcaagaccatcgccaataatctcaccagcaccgtgcaggtctttacggactcggagtaccagttaccgtacgtgctaggatccgctcaccagggatgtctgcctccgttcccggcggacgtcttcatgattcctcagtacggctatttaactttaaacgacggaagccaagccgtgggacgttcctccttctactgtctggagtatttcccatcgcagatgctgagaaccggcaacaactttcagttcagctacaccttcgaggacgtgcctttccacagcagctacgcgcacagccagagcctggacaggctgatgaatcccctcatcgaccagtacctgtactttctgtccagaacgcaaacgactggaactgcagggacgcagactctgcaattcagccaagcgggtcctagctcaatggccaaccaggctagaaattgggtgcccggaccttgctaccggcagcagcgcgtctccacgacagtcacccagaacaacaacagcgaatttgcctggcccggagctaccaagtatcacctgaacggccgagactctctaatgaatccgggcgtggcaatggcttcccacaaggagggagaggaccgcttcttccctcttagcggggtcctgatttttggcaagcaaggaacggggcgcgataatgtggatgccgataaggtgatgattacaaatgaggaagaaatcaagactaccaaccccgtggccacagaagaatatggagcagtggccaccaaccaccagtccgcccaggcgcaggcgcagaccggactcgtgcacaaccagggggtgcttcccggcatggtgtggcagaatagagacgtgtacctgcagggtcccatctgggccaaaattcctcacacggacggcaactttcacccgtctcccctgatgggcggctttggactgaagcacccgcctcctcaaattctcatcaagaacacaccagttccagcggacccgccgactaccttcaaccaggccaagctgaactctttcatcacgcagtacagcaccggacaggtcagcgtggaaatcgagtgggagctgcagaaagaaaacagcaaacgctggaatccagagattcaatacacttccaactactacaaatctaacaatgtggaatttgctgtcaacacggagggggtttatagcgagcctcgccccattggcacccgttttctcacccgcaacctgtaa

SEQ ID NO: 275 - DNA, 2184 bp, Adeno-Associated Virus
  source 1..2184: mol_type = other DNA; note = BCD_0389
atgtcgtttgttgatcaccctccagattggttggaagaggttggtgaaggccttcacgagtttttggagctcgaagctggcccacccaaaccgaagcccaaccagcagaagcaggacaacgcccgtggtcttgtactgcctggatataattatctgggacccttcaacggactcgacaagggagatcccgtcaaccgagcggacgctgttgcgcgagagcacgacatctcgtacaacgagcagctccaggcgggagacaacccctacctcaagtacaaccacgcggacgccgagtttcaggagaagctcaaggacgacacctcctttgggggcaacctcggaaaggcaatctttcaggccaagaaaagggttcttgaaccttttggcctggttgaagctcttgttaagacggctccagccaagaagaggccgatagagaagtctccggcggaaccgagctcttcgaagggcatcggaaaggcgggccagcagcctgcgagaaagcgactcaactttggtcagactggagacgccgactccgcccctgacccccagcctctcggagaaccacccgcagccccctctggtctgggaactggtacgatggcttcaggcagtggcgcaccaatggcagacaataacgaaggcgccgacggagtgggtaatgcctcgggaaattggcattgcgattccacatggctgggcgaccgagtcatcaccaccagcacccgcacctgggccctgcccacctacaacaaccacctctacaagcaaatctcctccagcaattacggagccaataatgacaaccactactttggctacagcaccccctgggggtactttgacttcaaccgcttccactgccacttctctccacgagactggcagcggctcatcaataacaactgggggttccggcccaagcgactcaacttcaagctgttcaacattcaagtcaaggaggtcacggaaacggaaggcaccaagaccatcgccaataaccttaccagcacggttcaggtctttgcggattctgagtaccagctcccgtacgtactcggatcggcacaccagggctgtttcccgccgtttccggcagacgtcttcatgatcccgcagtacgggtacctgacgctaaacaacggcagtcatgccatgggccgctcgtccttctactgcctggagtactttccgtcacagatgctgcggacggggaacaacttcacgttcagctacaccttcgaggacgtgcccttccacagcagctacgcgcacagccagagcctggaccggctcatgaatcctctcatcgaccagtatctgtactacttgagcaagacgcagaacggtttgggcttttctcaagcaggacccaccagcatgcggaaccagtccagaaactggctcccgggaccctgcttccgtcagcagcgagtttcagaaagatccacagaaaacaacaacggagacttctcgtggacgggagccaccaagtatcacctcaatggaagaaactctgcgatgaatccaggcccggccatggccagtcacaaggacgacgaggacagattctttccgcaaaacggcgtgctcatctttggaacaccgaacgctactgcaagtaatacacctctagagaatgtactgatcaccgatgaggaggaaatcagaactacgaaccctgtggccacggaagagtacgggatcgttgctaacaataaacaggacggcagtacacaggcgacgaccgcgattgtcaacgcacaaggcatcctgcccggcatggtgtggcaggatcgagatgtgtacctacaaggacccatctgggccaagataccccacacggatggacacttccacccatcaccgctcatgggcgggttcggccttaagcatccacctccgcagatccttatcaagaacacgcctgtgccgtcgaaccctccagaaaagttcacacaggaaaaactcaatgccttcatcacacagtactccacgggacaggtcagcgtggagatcgagtgggagctgcagaaagagaacagtaagcgctggaaccccgaggtccagtacacttccaattacaacaagtctgtcaacgtggacttcaccgtggacaccaacggcatgtactcggagcctcgcaccattggaacccgctaccttacccgcaacctgtaa

SEQ ID NO: 276 - DNA, 2184 bp, Adeno-Associated Virus
  source 1..2184: mol_type = other DNA; note = BCD_0390
atgtcgtttgttgatcaccctccagattggttggaagaggtcggtgaaggccttcacgagtttttggagctcgaagctggcccacccaaaccgaagcccaaccagcagaagcaggacaacgcccgtggtcttgtactgcctggatataattatctgggacccttcaacggactcgacaagggagagcccgtcaaccgagcggacgctgttgcgcgagagcacgacatctcgtacaacgagcagctccaggcgggagacaacccctacctcaagtacaaccacgcggacgccgagtttcaagagaagctcaaggacgacacctcctttgggggcaacctcggaaaggcaatctttcaggccaagaaaagggttctcgaaccttttggcctggttgaggcacctgttaagacggctccagccaagaagcggccgatagagaagtctccggcggaaccgagctcttcgaagggcatcggcaaggcgggccagcagcctgcgagaaagcgactcaactttggtcagactggagacaccgactccgccgctgacccccagcctctcggagaaccaccagcagccccctctggtctgggaactggtacgatggcttcaggcggtggcgcaccaatggcagacaataacgaaggcgccgacggagtgggtaatgcctcgggaaattggcattgcgattccacatggctgggcgaccgagtcatcaccaccagcacccgcacctgggccctgcccacctacaacaaccacctctacaagcaaatctcttctagcagtttcggagccacaaatgacgaccactactttggctacagcaccccctgggggtactttgacttcaaccgcttccactgccacttctccccgcgagactggcagcggctcatcaacaacaactgggggttccggcccaagcggctcaacttcaagctgttcaacatccaagtcaaggaggtcacggacacggacggcacgaaaaccatcgctaataaccttaccagcacggttcaggtctttgcggactcggagtaccagcttccgtacgtcctcggatcggcgcaccaaggctgcttcccgccgttcccggcggacgtcttcatgatcccgcagtacgggtacctgaccctgaacaacggcagccaggcgatgggtcgttcgtccttctactgtctggagtactttccgtcgcagatgctgagaacgggaaacaacttcacattcagctacaccttcgaggacgtgcccttccacagcagctatgcgcacagccagagcctggaccggctcatgaacccgctcatcgaccagtacctgtactacctgagcaagacaaatggcggtctggcgttttctcaagcagggcacaccaacatgcggaaccagtccaggaattggctcccggggccctgcttccgtcaacagcggatctcgaagacacccacagaaaacaataaccaagagttttcctggacgggggctacgaagtatcacctcaatggaagagactcggtgatgaacccgggcccggccatggccagtcacaaggacgacgagaacagattctttcctcaaaacggagtgctcatctttggaacaccgaacgctaatgcaaccaatgcacaactaaacgatgtactgatcaccgatgaggaggaaatcagaactacgaaccctgtggccacggaagagtacggcattgttgccaataacaaacagagctccagcacacaggcgacgaccacgaatgtcaatgcgcaaggcatccttccaggcatggtgtggcaggaccgagacgtgtacctgcagggacccatctgggccaagatcccccacacggatggacacttccacccctcgccgcttatgggcgggttcggccttaagcatccacctccgcagatcctcatcaagaatactcctgtgccgtcgaaccccccggaaacgttcaaacaggaaaagctcaatgccttcataactcaatattccacgggccaggtcagcgtggagatcgagtgggagctgcagaaggagaacagcaagcgctggaaccccgaggtccagtacacatccaattacaacaagtctgtcaacgtggactttaccgtggacaccaacggtgtgtactcggaaccccgcaccatcggaacccgctaccttacccgcaacctgtaa

SEQ ID NO: 277 - DNA, 2187 bp, Adeno-Associated Virus
  source 1..2187: mol_type = other DNA; note = BCD_0391
atgtcgtttgttgatcaccctccagattggttggaagaggttggtgaaggccttcacgagtttttggagctcgaagctggcccacccaaaccgaagcccaaccagcagaagcaggacaacgcccgtggtcttgtactgcctggatataattatctgggacccttcaacggactcgacaagggagagcccgtcaaccgagcggacgccgttgcgcgagagcacgacatctcgtacaacgagcagctccaggcgggagacaacccctacctcaagtacaaccacgcggacgccgagtttcaggagaagctcaaggacgacacctcctttgggggcaacctcggaaaggcaatctttcaggccaagaaaagggttctcgaaccttttggcctggttgaggcacctgttaagacggctccagccaagaagcggccgatagagaagtctccggtggaaccgagctcttcgaagggcatcggcaaggcgggccagcagcctgcgagaaagcgactcaactttggtcagactggagacgccgactccgcagccgacccacagcctctcggagaaccacccgcagccccctctggtctgggaactggtacgatggcttcaggcggtggcgcaccaatggcagacaataacgaaggcgccgacggagtgggtaatgcctcgggaaattggcattgcgattccacatggctgggcgaccgagtcatcaccaccagcacccgcacctgggccctgcccacctacaacaaccacctctacaagcaaatctccagtagttccggatcgggtgctaccaacgacaaccactactttggctacagcaccccctgggggtactttgacttcaaccgcttccactgccacttctccccgcgagactggcagcggctcatcaacaacaactgggggttccggcccaagcgactcaacttcaagctgttcaacatccaagtcaaggaagttactgaaacggacggcacgaagaccatcgccaataaccttaccagcacggttcaggtctttgcggactcggagtaccagctcccgtacgtcctcggatcagcgcaccagggctgcttcccgccgttcccggcggacgtcttcatggtcccgcaatacgggtacctgacgctgaataacggcagccaggcgatgggtcgctcgtccttctactgcctggagtactttccgtcgcagatgctgcggacggggaacaacttcacgttcagctacaccttcgaggacgtgcccttccacagcagctacgcgcacagtcagagcctggaccggctgatgaacccgctcatcgaccaatatctgtactacctgagcaagactcagaacggattggcgttctctcaagcggggccctcgagcatgcggaaccagtccaggaactggcttccggggccttgcttccgacagcagcggatctcaaagacgtcaacggagaacaataacggagaattctcgtggacgggagccacaaaatatcatctcaacggcagagactctgtgatgaacccaggtccagccatggctagccacaaggacgacgaacacaggttcttccctcagaatggcgtgctcatctttggaaaacaaggcgcagacaagaccaatgcgatactcgacaaagtgatagttacagacgaagaggagattagggctacgaaccctgtggccacagaggaatatggattcgtcgccaccacccttcagaatgggcaaactgcagcagacacaaccagggttaatgcacaaggaatccttcccggcatggtgtggcaagatagagacgtgtaccttcagggacccatctgggccaagatcccctacacggacggacattttcatccctcgccactcatgggcgggttcggactcaagcacccgcccccgcagattctcatcaagaatacacctgtaccttcgaatcctccagatacattcaacccggaaaagctaaattcttttataactcaatattcaacgggccaggtcagtgtggagatcgagtgggagcttcagaaggaaaacagcaagcgctggaaccccgaggtccagtacacgtccaactacgacaagtccgtcaacgtggacttcaccgtgaacggggatggcgtgtactcggagccacgaaccatcggtacccgctaccttacccgcaacctgtaa

SEQ ID NO: 278 - DNA, 2184 bp, Adeno-Associated Virus
  source 1..2184: mol_type = other DNA; note = BCD_0392
atgtcgtttgttgatcaccctccagattggttggaagaggttggtgaaggccttcacgagtttttggagctcgaagctggcccacccaaaccgaagcccaaccagcagaagcaggacaacgcccgtggtcttgtactgcctggatataattatctgggacccttcaacggactcgacaagggagagcccgtcaaccgagcggacgctgttgcgcgagagcacgacatctcgtacaacgagcagctccaggcgggagacaacccctacctcaagtacaaccacgcggacgccgagtttcaggagaagctcaaggacgacacctcctttgggggcaacctcggaaaggcaatctttcaggccaagaaaagggttctcgaaccttttggcctggttgaggcacctgttaagacggctccagccaagaagcggccgatagagaagtctccggcggaaccgagctcttcgaagggcatcggcaaggcgggccagcagcctgcgagaaagcgactcaactttggtcagactggagacaccgactccgccgctgacccccagcctctcggagaaccaccagcagccccctctggtctgggaactggtacgatggcttcaggcggtggcgcaccaatggcagacaataacgaaggcgccgacggagtgggtaatgcctcgggaaattggcattgcgattccacatggctgggcgaccgagtcatcaccaccagcacccgcacctgggctctgcctacctacaacaaccacctctacaagcagatctcctccagcaattacggagccaataacgacaaccactactttggctacagcaccccctgggggtactttgacttcaaccgcttccactgccacttctccccgcgagactggcagcggctcatcaacaacaactggggattccgaccaaagagactcaacttcaagctgttcaacatccaagtcaaggaggtcacggaaacggacggcaccaagactatcgccaataaccttaccagcacggttcaggtctttgcggattcggagtaccagctcccgtacgtcctcggctcggcgcaccagggctgcttcccgccgttcccggcggacgtcttcatgatcccgcagtacgggtacctaaccctgaacaacggcagtcatgcgatgggccgttcgtccttctactgtctggagtactttccgtcgcagatgctgcggacggggaacaacttcacgttcagctacaccttcgaggacgtgcccttccacagcagctacgcgcatagccagagcctggaccggctcatgaacccgctcatcgaccagtacctgtactacctgagcaagacacagaacggcttaggcttttctcaagcgggacccaccagcatgcggaaccagtccagaaactggctcccgggaccctgcttccgtcaacagcgagtttcagaaagatccacagaaaacaacaacggagacttctcgtggacagggaccacgaaataccatctcaacggtagagactcggcgatgaatccgggcccggccatggccagtcacaaggacgacgaggacagattctttccgcaaaacggcgtgctcatctttggaacaccgaacgctaatgcaaccaatgcacctctagagaatgtactgataaccgatgaggaggaaatcagaactacgaaccctgtggctacggaagagtacgggatcgttgctaacaacaaacaggacagcagtacacaggcgacgaccgcgattgtcaacgcacaaggcatcctgcccggcatggtgtggcaggatcgagatgtgtacctgcaggggcccatctgggccaagatacctcacacggatggacacttccacccatcaccgctcatgggcgggttcggccttaagcatccacctccgcagatcctcatcaagaacacgcctgtgccgtcgaaccctccagaaaaattcacccaggaaaaactcaatgccttcatcacacagtactccacgggacaggtcagcgtggagatcgagtgggagctgcagaaggagaacagcaagcgctggaaccccgaggtccagtacacgtccaactacaacaagtccgtcaacgtggacttcaccgtagacaccaacggcatgtactcggagccgcgcaccatcggaacccgctaccttacccgcaacctgtaa

SEQ ID NO: 279 - DNA, 2184 bp, Adeno-Associated Virus
  source 1..2184: mol_type = other DNA; note = BCD_0393
atgtcgtttgttgatcaccctccagattggttggaagaggttggtgaaggccttcacgagtttttggagctcgaagctggcccacccaaaccgaagcccaaccagcagaagcaggacaacgcccgtggtcttgtactgcctggatataattatctgggacccttcaacggactcgacaagggagagcccgtcaaccgagcggacgccgttgcgcgagagcacgacatctcgtacaacgagcagctccaggcgggagacaacccctacctcaagtacaaccacgcggacgccgagtttcaggagaagctcaaggacgacacctccttcgggggcaacctcggaaaggcaatctttcaggccaagaaaagggttctcgaaccttttggcctggttgaggcacctgttaagacggctccagccaagaagcggccgatagagaagtctccggcggaaccgagctcttcgaagggcatcggcaaggcgggccagcagcctgcgagaaagcgactcaactttggtcagactggagacaccgactccgccgctgacccccagcctctcggagaaccacccgcagccccctctggtctgggaactggtacgatggcttcaggcagtggcgcaccaatggcagacaataacgaaggcgccgacggagtgggtaatgcctcgggaaattggcattgcgattccacatggctgggcgacagagtcatcaccaccagcacccgcacctgggccctgcccacctacaacaaccacctctacaagcaaatctccagtagtcaggccggagccaacaacgacaaccactactttggctacagcaccccctgggggtactttgacttcaaccgcttccactgccacttttccccgcgagactggcagcgactcatcaacaacaactgggggttccggcccaagcgactcaacttcaagctgttcaacatccaagtcaaggaggttacggacacggacggcacgaagaccatcgccaataaccttaccagcacggttcaggtctttgcggactcggagtaccagctcccgtacgtcctcggatcggcgcaccagggctgcttcccgccgttcccggcggacgtcttcatggtcccgcagtacgggtatctgacgctgaacaacggcagccaggcgatgggtcgttcgtccttctattgtctggagtactttccgtcgcagatgctgcggacgggaaacaactttacattcagctacaccttcgaggacgtgcccttccacagcagctacgcgcacagccagagtctggaccggctcatgaacccactcatcgaccagtacctgtactacctaagcaagacaaatggcggtctaggattttcccaagcgggacccaacagcatgcgcgaccagtccaggaattggctgccgggaccctgcttcagacaacaacggatttcaactgtacctacacaaaataacaacggagacttttcgtgggcgggagccacaaagtatcatctcaatggtagaaactcggcgatgaacccgggcccggccatggctagccataaggacgacgagcacaggttcttccctcagaacggcgtgctcatctttggaaaacagggcgcagaaaaaaacaatgcgatactcgacaaggtaatcatcactgacgaggaggagatcaggaccacaaaccctgtagccacggaggagtacgggtttgtcgccactagtctacaaagcccgaccgaagcagccgagaccgcaagagtcaacgcgcaaggcatcctccctggcatggtgtggcaggaccgagacgtgtatctgcaggggcccatctgggccaagatcccccacacggatggacacttccacccctcgccgctcatgggcgggttcggccttaaacatccacctccgcagatcctcatcaagaatactcctgtgccgtcgaaccctccagaaacgttcacgcaggaaaagctcaatgccttcatcacgcagtactcgacgggacaggtcagtgtggagatcgagtgggagctgcagaaggagaacagcaagcgctggaaccccgaggttcagtacacctccaactacaacaagtccgtcaacgtagacttcaccgtggacaccaacggcgtgtactcggaaccgcgcaccatcggcacccgataccttacccgcaacctgtaa

SEQ ID NO: 280 - DNA, 2184 bp, Adeno-Associated Virus
  source 1..2184: mol_type = other DNA; note = BCD_0394
atgtcgtttgttgatcaccctccagattggttggaagaggttggtgaaggccttcacgagtttttggagctcgaagctggcccacccaaaccgaagcccaaccagcagaagcaggacaacgcccgtggtcttgtactgcctggatataattatctgggacccttcaacggactcgacaagggagagcccgtcaaccgagcggacgccgttgcgcgagagcacgacatctcgtacaacgagcagctccaggcgggagacaacccctacctcaagtacaaccacgcggacgccgagtttcaggagaagctcaaggacgacacctccttcgggggcaacctcggaaaggcaatctttcaggccaagaaaagggttctcgaaccttttggcctggttgaggcacctgttaagacggctccagccaagaagcggccgatagagaagtctccggcggaaccgagctcttcgaagggcatcggcaaggcgggccagcagcctgcgagaaagcgactcaactttggtcagactggagacaccgactccgccgctgacccccagcctctcggagaaccacccgcagccccctctggtctgggaactggtacgatggcttcaggcggtggcgcaccaatggcagacaataacgaaggcgccgacggagtgggtaatgcctcgggaaattggcattgcgattccacatggctgggcgaccgagtcatcaccaccagcacccgcacctgggccctgcccacctacaacaaccacctctacaagcaaatctccagtagtcaggccggagccaacaacgacaaccactactttggctacagcaccccctgggggtactttgacttcaaccgcttccactgccacttttccccgcgagactggcagcggctcatcaacaacaactgggggttccggcccaagcgactcaacttcaagctgttcaacatccaagtcaaggaggttacggacacggacggcacgaagaccatcgccaataaccttaccagcacggttcaggtctttgcggactcggagtaccagctcccgtacgtcctcggatcggcgcaccagggctgcttcccgccgttcccggcggacgtcttcatggtcccgcagtacgggtatctgacgctgaacaacggcagccaggcgatgggtcgttcgtccttctattgtctggagtactttccgtcgcagatgctgcggacgggaaacaactttacattcagctacaccttcgaggacgtgcccttccacagcagctacgcgcacagccagagtctggaccggctcatgaacccactcatcgaccagtacctgtactacctaagcaagacaaatggcggtctaggattttcccaagcgggacccaacagcatgcgcgaccagtccaggaattggctgccgggaccctgcttcagacaacaacggatttcaactgtacctacacaaaataacaacggagacttttcgtgggcgggagccacaaagtatcatctcaatggtagaaactcggcgatgaacccgggcccggccatggctagccataaggacgacgagcacaggttcttccctcagaacggcgtgctcatctttggaaaacagggcgcagaaaaaaacaatgcgatactcgacaaggtaatcatcactgacgaggaggagatcaggaccacaaaccctgtagccacggaggagtacgggtttgtcgccactagtctacaaagcccgaccgaagcagccgagaccgcaagagtcaacgcgcaaggcatcctccctggcatggtgtggcaggaccgagacgtgtatctgcaggggcccatctgggccaagatcccccacacggatggacacttccacccctcgccgctcatgggcgggttcggccttaaacatccacctccgcagatcctcatcaagaatactcctgtgccgtcgaaccctccagaaacgttcacgcaggaaaagctcaatgccttcatcacgcagtactcgacgggacaggtcagtgtggagatcgagtgggagctgcagaaggagaacagcaagcgctggaaccccgaggttcagtacacctccaactacaacaagtccgtcaacgtagacttcaccgtggacaccaacggcgtgtactcggaaccgcgcaccatcggcacccgctaccttacccgcaacctgtaa

SEQ ID NO: 281 - DNA, 2184 bp, Adeno-Associated Virus
  source 1..2184: mol_type = other DNA; note = BCD_0395
atgtcgtttgttgatcaccctccagattggttggaagaggttggcgaaggccttcacgagtttttggagctcgaagctggcccacccaaaccgaagcccaaccagcagaagcaggacaacgcccgtggtcttgtactgcctggatataattatctgggacccttcaacggactcgacaagggagagcccgtcaaccgagcggacgccgttgcgcgagagcacgacatctcgtacaacgagcagctccaggcgggagacaacccctacctcaagtacaaccacgcggacgccgagtttcaggagaagctcaaggacgacacctcctttgggggcaacctcggaaaggcaatctttcaggccaagaaaagggttcttgaaccttttggcctggttgaggcacctgttaagacggctccagccaagaagcggccgatagagaagtctccggcggaaccgagctcttcgaagggcatcggcaaggcgggccagcagcctgcgagaaagcgactcaactttggtcagactggagacgccgactccgccgctgacccccagcctctcggagaaccacccgcagccccctctggtctgggaactggtacgatggcttcaggcagtggcgcaccaatggcagacaataacgaaggcgccgacggagtgggtaatgcctcgggaaattggcattgcgattccacatggctgggcgaccgagtcatcaccaccagcacccgcacctgggccctgcccacctacaacaaccacctctacaagcaaatctccagtagtcaggccggagccaacaacgacaaccactactttggctacagcaccccctgggggtactttgacttcaaccgcttccactgccacttttccccgcgagactggcagcggctcatcaacaacaactgggggttccggcccaagcgactcaacttcaagctgttcaacatccaagtcaaggaggttacggacacggacggcacgaagaccatcgccaataaccttaccagcacggttcaggtctttgcggactcggagtaccagctcccgtatgtcctcggctcggcgcaccagggctgcttcccgccgttcccggcggacgtcttcatggtcccgcaatacgggtatctgacgctgaacaacggcagtcaggcgatgggtcgttcgtccttctactgcctggagtactttccgtcgcagatgctgcggacggggaacaacttcacgttcagctacaccttcgaggatgtgcccttccacagcagctacgcgcacagccagagccttgaccggctgatgaacccgctcatcgaccagtacctgtactacctaagcaagacaaatggcggtctaggattttcccaagcgggacccaacagcatgcgcgaccagtccaggaattggctgccgggaccctgcttcagacaacaacggatttcaactgtacctacacaaaataacaacggagacttttcgtgggcgggagccacaaagtatcatctcaatggtagaaactcggcgatgaacccgggcccggccatggctagccataaggacgacgagcacaggttcttccctcagaacggcgtgctcatctttggaaaacagggcgcagaaaaaaacaatgcgatactcgacaaggtaatcatcactgacgaggaggagatcaggaccacaaaccctgtagccacggaggagtacgggtttgtctccactagtctacaaagcccgaccgaagcagccgagaccgcaagagtcaacgcgcaaggcatcctccctggcatggtgtggcaggaccgagacgtgtatctgcaggggcccatctgggccaagatcccccacacggatggacacttccacccctcgccgctcatgggcgggttcggccttaaacatccacctccgcagatcctcattaagaatactcctgtgccgtcgaaccctccagaaacgttcacgcaggaaaagctcaatgccttcatcacgcagtactcgacgggacaggtcagtgtggagatcgagtgggagctgcagaaggagaacagcaagcgctggaaccccgaggttcagtacacctccaactacaacaagtccgtcaacgtagacttcaccgtggacaccaatggcgtgtactcggaaccccgcaccatcggcacccgctaccttacccgcaacctgtaa

SEQ ID NO: 282 - DNA, 2184 bp, Adeno-Associated Virus
  source 1..2184: mol_type = other DNA; note = BCD_0396
atgtcgtttgttgatcaccctccagattggttggaagaggttggtgaaggccttcacgagtttttggagctcgaagctggcccacccaaaccgaagcccaaccagcagaagcaggacaacgcccgtggtcttgtactgcctggatataattatctgggacccttcaacggactcgacaagggagagcccgtcaaccgagcggacgccgttgcgcgagagcacgacatctcgtacaacgagcagctccaggcgggagacaacccctacctcaagtacaaccacgcggacgccgagtttcaggagaagctcaaggacgacacctccttcgggggcaacctcggaaaggcaatctttcaggccaagaaaagggttctcgaaccttttggcctggttgaggcacctgttaagacggctccagccaagaagcggccgatagagaagtctccggcggaaccgagctcttcgaagggcatcggcaaggcgggccagcagcctgcgagaaagcgactcaactttggtcagactggagacaccgactccgccgctgacccccagcctctcggagaaccacccgcagccccctctggtctgggaactggtacgatggcttcaggcggtggcgcaccaatggcagacaataacgaaggcgccgacggagtgggtaatgcctcgggaaattggcattgcgattccacatggctgggcgaccgagtcatcaccaccagcacccgcacctgggccctgcccacctacaacaaccacctctacaagcaaatctcctctagcagtttcggagccaccaacgacaaccactactttggctacagcaccccctgggggtactttgacttcaaccgcttccactgccacttctcgccgcgagactggcagcgactcatcaacaacaactgggggttccggcctaagcggctcaacttcaagctgttcaacattcaagtcaaggaggtcacggagaatgacggcaccaagacgattgccaataaccttaccagcacggttcaggtctttgcggattcggagtaccagctcccgtacgtcctcggatcggcgcaccagggctgctttccgccgttcccggcggacgtcttcatggtcccgcagtacgggtacctgacgctgaacaacgggagtcaggcgatgggtcgctcgtccttctactgcctggagtactttccgtcgcagatgctgcggacgggaaacaacttcacattcagctacaccttcgaggacgtgcccttccacagcagctacgcgcacagccagagtctggaccggctgatgaatccgctcatcgaccagtatctgtactacctgagcaagacagcaggtggtctggcgttttctcaagcgggacccaccagcatgcgagatcagtctaggaactggctcccggggccctgcttccgtcaacagcggatctcgaagacacccacagaaaacaataaccaagagttctcctggacgggggctacgaagtatcacctcaatggaagagactcggtgatgaacccgggcccggccatggccagtcacaaggacgacgagaacagattctttcctcaaaacggagtgctcatctttggaacaccgaacgctaatgcaaccaatgcacaactaaacgatgtactgatcaccgatgaggaggaaatcagaactacgaaccctgtggccacagaagagtacggcatcgttgccaataacaaacagagctccagcacacaggcgacgaccacgaatgtcaatgcgcaaggcatccttccaggcatggtgtggcaggaccgagatgtgtacctgcaggggcccatctgggccaagatcccccacacggatggacacttccacccatcaccgcttatgggcggattcggccttaagcatccacctccgcagatcctcatcaagaacactcctgtgccgtcgaaccctccagaaacattcaagcaggaaaagctcaatgccttcatcacgcagtactctacgggacaggtcagcgtggagatcgagtgggaactgcagaaggagaacagcaaacgctggaaccccgaggtccagtacacgtccaactacaacaagtccgtcaacgtggacttcactgtggacaccaacggcgtgtactcggaaccgcgcaccatcggcacccgctaccttacccgcaacctgtaa

SEQ ID NO: 283 - DNA, 2184 bp, Adeno-Associated Virus
  source 1..2184: mol_type = other DNA; note = BCD_0413
atgtcgtttgttgatcaccctccagattggttggaagaggttggtgaaggccttcacgagtttttggagctcgaagctggcccacccaaaccgaagcccaaccagcagaagcaggacaacgcccgtggtcttgtactgcctggatataattatctgggacccttcaacggactcgacaagggagagcccgtcaaccgagcggacgctgttgcgcgagagcacgacatctcgtacaacgagcagctccaggcgggagacaacccctacctcaagtacaaccacgcggacgccgagtttcaggagaagctcaaggacgacacctcctttgggggcaacctcggaaaggcgatctttcaggccaagaaaagggttctcgaaccttttggcctggttgaggcacctgttaagacggctccagccaagaagcggccgatagagaagtctccggcggaaccgagctcttcgaagggcatcggcaaggcgggccagcagcctgcgaggaagcgactcaactttggtcagactggagacaccgactccgtcgctgacccccagcctctcggagaaccacccgcagccccctctggtctgggaactggtacgatggcttcaggcagtggcgcaccaatggcagacaataacgaaggcgccgacggagtgggtaatgcctcgggaaattggcattgcgattccacatggctgggcgaccgagtcatcaccaccagcacccgcacctgggccctgcccacctacaacaaccatctctacaagcaaatctcctctggcaattacggagccaacaacgacaaccactactttggatacagcaccccctgggggtactttgacttcaatcgcttccactgtcacttctcgccgcgagactggcagcgactcatcaacaacaactgggggttccggcccaagcggctcaacttcaagctgttcaacatccaagtcaaggaggttacggacacggacggcacgaagaccatcgccaataaccttaccagcacggttcaggtctttgcggactcggagtaccagctgccgtatgtccttggctcggcacaccagggctgcttcccgccgttcccagcggacgtcttcatgatcccacagtacggatacctgacgctgaacaacggcagccaggccatgggccgctcgtccttctactgtctggaatactttccgtcgcagatgctgcggacgggaaacaacttcacgttcagctacacctttgaggacgtgcccttccacagcagctacgcgcacagccagagcctggaccggctcatgaacccgctcatcgaccagtacctgtactacctgagcaagacaaatggcggtctggcgttttctcaagcagggcacaccaacatgcggaaccagtccaggaactggcttccggggccctgcttccgtcaacagcggatctcgaagacaccaacagaaaacaataaccaagagttttcctggacaggggctacgaagtatcacctcaatggaagagactctgtgatgaatccgggcccggccatggccagtcacaaggacgacgagaacagattctttccgcaaaacggagtgcttatctttggaacatcgaacgctaatgcaaccaatgcacaactaaacgatgtactgatcaccgatgaggaggaaatcagaactacgaaccctgtggccacagaagagtacggcatcgttgccaataacaaacagagctccagcacacaggcgacgaccacgaatgtcaatgcgcaaggcatccttccaggcatggtgtggcaggaccgagatgtgtatctgcagggacccatctgggctaagattccccacacggatggacacttccacccctcgccgctcatgggcggattcggccttaagcatccacctccgcagatcctcattaagaatacgccggtgccttcgaatcctccagagacattcaaccctgcaaaactcaatgctttcatcacgcagtactccacgggccaggtcagcgtggagatcgagtgggagctacagaaggagaacagcaagcgctggaaccccgaggtccagtacacctccaattacaacaagtccgtcaacgtggacttcaccgtggacactaacggcgtgtactcggaaccgcgcaccatcggcacccgctaccttacccgcaacctgtaa

SEQ ID NO: 284 - DNA, 2181 bp, Adeno-Associated Virus
  source 1..2181: mol_type = other DNA; note = BCD_0414
atgtcgtttgttgatcaccctccagattggttggaagaggttggtgaaggccttcacgagtttttggagctcgaagctggcccacccaaaccgaagcccaaccagcagaagcaggacaacgcccgtggtcttgtactgcctggatataattatctgggacccttcaacggactcgacaagggagagcccgtcaaccgagcggacgctgtcgcgcgagagcacgacatctcgtacaacgagcagctccaggcgggagacaacccctacctcaagtacaaccacgcggacgccgagtttcaggagaagctcaaggacgacacctcctttgggggcaacctcggaaaggcaatctttcaggccaagaaaagggttctcgaaccttttggcctggttgaggaacctgttaagacggctccagccaagaagcggccgatagagaagtctccggcggaaccgagctcttcgaagggcatcggcaaggcgggccagcagcctgcgaggaagcgactcaactttggtcagactggagacaccgactccgccgctgacccccagcctctcggagaaccacctgcagccccctctggtctgggaactggtacgatggcttcaggcggtggcgcaccaatggcagacaataacgaaggcgccgacggagtgggtaatgcctcgggaaattggcattgcgattccacatggctgggcgaccgagtcatcaccaccagcacccgcacctgggccctgcccacctacaacaaccatctctacaagcaaatctccagccagtctggagccaacaacgacaaccactactttggctacagcaccccctgggggtactttgacttcaaccgcttccactgccacttctcgccgcgagactggcagcggctcatcaacaacaactggggcttccggcccaagcgactcaacttcaagctgttcaacatccaagtcaaggaggtcactcagacggacggcacgaagacgatcgccaataaccttaccagcacggttcaggtctttgcggactcggagtaccagctcccgtacgtcctcggatcagcgcaccagggctgcttcccgccgttcccggcggatgtcttcatggtcccgcagtacgggtatctgacgctgaacaacggcagccaggcgatgggccgttcgtccttctattgcttggagtactttccgtcacagatgctgcggacggggaacaacttcacgttcagctacaccttcgaggacgtgcccttccacagcagctacgcgcacagtcagagcctggaccggctgatgaacccgctcatcgaccagtatctgtactacctgagcaagacgcagaacggcttgggcttttctcaagcggggccctcgagcatgcgggatcagtccaggaactggcttccggggccttgcttccgacagcagcggatctcgaaaacgcctacgcaaaataacactggagactttgcgtggacaggaaccacgaggtaccacctcaacggtcgagactcggtgatgaacccgggtccggctatggctagccacaaagatgacgaagacagattcttccctcaaaatggtgtactcatttttggaaaaaaagatgcagaaaaaaacaatgcggtacttgacaaggtgatcatcactgacgaagaggaaatcagaaccacgaaccctgttgcaacggaagaatacgggctcgttgctaccagcctccaaaacaatacaaccacagcagataccgagagggtcaacgcacagggcatcctacccggcatggtgtggcaagaccgagacgtgtatctgcaaggacccatctgggccaagattccatacacggacggacacttccatccctcgccactcatgggcgggttcggcctcaagcgcccgcctccgcaaatcctcatcaagaacacccccgtaccagcggatcccgccacgacattcaacccggcgaagctagcgtccttcatcacgcagtactccacgggccaggtcagcgtggagatcgagtgggagctgcagaaggagaacagcaagcgctggaaccccgaggtccagtacacgtccaactacaacaagtccgtcaacgtggaatttacagtggacaacaacggcgtgtattcggaaccgcgaaccatcggaacccgctaccttacccgcaacctgtaa

SEQ ID NO: 285 - DNA, 2181 bp, Adeno-Associated Virus
  source 1..2181: mol_type = other DNA; note = BCD_0415
atgtcgtttgttgatcaccctccagattggttggaagaggttggtgaaggccttcacgagtttttggagctcgaagctggcccacccaaaccgaagcccaaccagcagaagcaggacaacgcccgtggtcttgtactgcctggatataattatctgggacccttcaacggactcgacaagggagagcccgtcaaccgagcggacgctgttgcgcgagagcacgacatctcgtacaacgagcagctccaggcgggagacaacccctacctcaagtacaaccacgcggacgccgagtttcaggagaagctcaaggacgacacctcctttgggggcaacctcggaaaggcaatctttcaggccaagaaaagggttctcgaaccttttggcctggttgaggcacctgttaagacggctccagccaagaagcggccgatagagaagtctccggcggaaccgagctcttcgaagggcatcggcaaggcgggccagcagcctgcgagaaagcgactcaactttggtcagactggagacaccgactccgccgctgacccccagcctctcggagaaccacccgcagccccctctggtctgggaactggtacgatggcttcaggcggtggcgcaccaatggcagacaataacgaaggcgccgacggagtgggtaatgcctcgggaaattggcattgcgattccacatggctgggcgaccgagtcatcaccaccagcacccgcacctgggccctgcccacctacaacaaccacctctacaagcagatctccagccagtctggagccaccaacgacaaccactactttggctacagcaccccctgggggtactttgacttcaaccgcttccactgccacttctccccgcgagactggcagcggctcatcaacaacaactggggcttccggcccaagcgactcaacttcaagctgttcaacatccaagtcaaggaggtcacggaaacggaaggcacaaagaccatcgccaataaccttaccagcacggttcaggtctttgcggactcggagtaccaactgccgtacgtcctcggctcggcgcaccagggctgcttcccgccgttcccggcggacgtcttcatgatcccacagtacgggtacttgacgctgaacaacggcagccaggccatgggccgttcgtccttctactgcctggagtactttccgtcgcagatgctgcggacgggaaacaacttcacattcagctacacctttgaggacgtgcccttccacagcagctacgcgcacagccagagcctggaccggcttatgaacccgctcatcgaccagtacctgtactacctgagcaagacacagaacggcctggcgttctctcaggcgggacccaacagcatgcgggaccagtccaggaaatggctcccggggccttgcttccgacaacaacggatctcgaagacgtcaacacaaaacaacaacaatgaatttgcgtggacgggagccacaaagtatcatctcaatggaagaaactcggcgatgaacccgggtccggctatggccactcataaagacgatgagcacaggttcttcccccaaaacggcgtgctaatctttggaaaacagggcgcagaaaaaaacaatgcgatactcgacaaggtaatcatcactgacgaggaggagattagggctacaaacccagtatccacggaggagtacggggtcgtcgctacaaatctccagaacggcaatacgcaggcgacgaccaacgacgtcaacgcacaaggcattcttccaggcatggtgtggcaggacagagacgtgtacctgcaggggcccatctgggccaagatccctcacacggacggacacttccacccgtctcctctcatgggcggattcggtctcaaacacccacctccacagatcctcatcaaaaacacacccgtgccatcggaccctccactgaccttcaatcaacaaaagctcgcgtctttcatcacgcagtactcgaccggacaggtcagcgtggagatcgagtgggagctgcagaaggagaacagcaagcgctggaaccccgaggtccagtacacgtccaactacgacaagtccgtcaacgtggacttcacagtgaacggggatggagtgtactcggaaccgcgaaccatcggaacccgctaccttacccgcaacctgtaa

SEQ ID NO: 286 - DNA, 2211 bp, Adeno-Associated Virus
  source 1..2211: mol_type = other DNA; note = BCD_0441
atggctgccgatggttatcttccagattggctcgaggacaacctctctgagggcattcgcgagtggtgggacttgaaacctggagccccgaaacccaaagccaaccagcaaaagcaggacgacggccggggtctggtgcttcctggctacaagtacctcggacccttcaacggactcgacaagggggagcccgtcaacgaggcagacgccgcggccctcgagcacgacaaggcctacgaccagcagctcaaagcgggtgacaatccgtacctgcggtataaccacgccgacgccgagtttcaggagcgtctgcaagaagatacgtcttttgggggcaacctcgggcgagcagtcttccaggccaaaaagagggtactcgagcctctcggtctggttgaggaaggcgctaagacggctcctggaaaaaagagaccggtagagcagtcaccccaagaaccggactcctcctcgggcatcggcaagacaggccagcagcccgctaaaaagagactcaattttggtcagactggcgactcagagtcagttcccgaccctcaaccaatcggagaacctccagcagccccctcaggtctgggatctaatacaatggcttcaggcggtggcgctccaatggcagacaataacgaaggcgccgacggagtgggtaattcctcgggaaattggcattgcgattccacatggctgggggacagagtcatcaccaccagcaccagaacctgggccctccccacctacaacaaccacctctacaagcaaatctccagtgcttcaacgggggccagcaacgacaaccactacttcggctacagcaccccctgggggtattttgatttcaacagattccactgccacttctcaccacgtgactggcagcgactcatcaacaacaattggggattccggcccaagagactcaacttcaagctcttcaacatccaagtcaaggaggtcacaacgaacgatggcgtcacgaccatcgctaataaccttaccagcacggttcaagtcttctcggactcggagtaccagttgccgtacgtcctcggctctgcgcaccagggctgcctccctccgttcccggcggacgtgttcatgattccgcagtacggctacctaacgctcaacaatggcagccaagccgtgggacgttcatccttttactgccttgaatatttcccttctcaaatgctgagaacgggcaataactttaccttcagctacaccttcgaggacgtgcctttccacagcagctacgcgcacagccagagcctggatcgactgatgaatcccctcatcgaccagtacctgtactacctgaatagaactcagaatcagtctggaagtgctcaaaataaggacttgctgtttagccgggggtctccagctggcatgtccgttcaacccaaaaactggctacctggaccctgttaccgacagcagcgtgtttctaaaacaaaaacagacaacaacaacagcaactttacctggactagtgcttcaaaatacaatcttaacggacgcgaatctatcatcaaccctggcactgctatggcctctcacaaagacgatgaagacaagttctttcccatgagcggtgtcatgatttttggcaaggagagcgccggagcttcaaacactgcattggacaatgtcatgattacagacgaagaggaaattaaagccactaaccctgtggccaccgaaagatttgggactgtggcagtcaatttacagagcagcagtacagaccctgtgaccggagatgtgcatgttatgggagtcttacctggcatggtatggcaagacagagacgtgtacctgcagggtcccatttgggccaaaattcctcacacggatggacactttcacccgtctcctctcatgggcggctttggacttaagcacccgcctcctcagatcctcatcaaaaacacgcctgttcctgcgaatcctccggcagagttttcagctacaaagtttgcttcattcatcacccaatactccacaggacaagtgagcgtggaaatcgaatgggagctgcaaaaagaaaacagcaagcgctggaatcccgaagtgcagtacacatctaattatgcaaaatctgccaacgttgatttcactgtggacaacaatggactttatactgagcctcgccccattggcacccgttacctcacccgtcccctgtaa

SEQ ID NO: 287 - DNA, 2211 bp, Adeno-Associated Virus
  source 1..2211: mol_type = other DNA; note = BCD_0442
atggctgccgatggttatcttccagattggctcgaggacaacctctctgagggcattcgcgagtggtggaacctgaaacctggagccccgaaacccaaagccaaccagcaaaagcaggacaacggccggggtctggtgcttcctggctacaagtacctcggacccttcaacggactcgacaagggggagcccgttaacgcggcggacgcagcggccctcgagcacgacaaggcctacgaccagcagctccaagcgggtgacaatccgtacctgcggtataaccacgccgacgccgagtttcaggagcgtctgcaagaagatacgtcttttgggggcaacctcgggcgagcagtcttccaggccaagaagagggttctcgaaccttttggtctggttgaggaaggtgctaagacggctcctggaaagaaacgtccggtagagcagtcaccccaagaaccagactcctcatcgggcatcggcaaatcaggccagcagcccgctaaaaagagactcaattttggtcagactggcgactcagagtcagtccccgacccacaacctctcggagaacctccagcaacccccgctgctgtgggacctactacaatggcttcaggcggtggcgcaccaatggcagacaataacgaaggcgccgacggagtgggtaatgcctcaggaaattggcattgcgattccacatggctgggcgacagagtcatcaccaccagcacccgaacatgggccttgcccacctataacaaccacctctacaagcaaatctccagtgcttcaacgggggccagcaacgacaaccactacttcggctacagcaccccctgggggtattttgatttcaacagattccactgccacttctcaccacgtgactggcagcgactcatcaacaacaattggggattccggcccaagagactcaacttcaagctcttcaacatccaagtcaaggaggtcacaacgaacgatggcgtcacgaccatcgctaataaccttaccagcacggttcaagtcttctcggactcggagtaccagttgccgtacgtcctcggctctgcgcaccagggctgcctccctccgttcccggcggacgtgttcatgattccgcagtacggctacctaacgctcaacaatggcagccaagccgtgggacgttcatccttttactgccttgaatatttcccttctcaaatgctgagaacgggcaataactttaccttcagctacaccttcgaggacgtgcctttccacagcagctacgcgcacagccagagcctggatcgactgatgaatcccctcatcgaccagtacctgtactacctgaatagaactcagaatcagtctggaagtgctcaaaataaggacttgctgtttagccgggggtctccagctggcatgtccgttcaacccaaaaactggctacctggaccctgttaccgacagcagcgtgtttctaaaacaaaaacagacaacaacaacagcaactttacctggactagtgcttcaaaatacaatcttaacggacgcgaatctatcatcaaccctggcactgctatggcctctcacaaagacgatgaagacaagttctttcccatgagcggtgtcatgatttttggcaaggagagcgccggagcttcaaacactgcattggacaatgtcatgattacagacgaagaggaaattaaagccactaaccctgtggccaccgaaagatttgggactgtggcagtcaatttacagagcagcagtacagaccctgtgaccggagatgtgcatgttatgggagccttacctggcatggtatggcaagacagagacgtgtacctgcagggtcccatttgggccaaaattcctcacacggatggacactttcacccgtctcctctcatgggcggctttggacttaagcacccgcctcctcagatcctcatcaaaaacacgcctgttcctgcgaatcctccggcagagttttcagctacaaagtttgcttcattcatcacccaatactccacaggacaagtgagcgtggaaatcgaatgggagctgcaaaaagaaaacagcaagcgctggaatcccgaagtgcagtacacatctaattatgcaaaatctgccaacgttgatttcactgtggacaacaatggactttatactgagcctcgccccattggcacccgttacctcacccgtcccctgtaa

SEQ ID NO: 288 - DNA, 2181 bp, Adeno-Associated Virus
  source 1..2181: mol_type = other DNA; note = BCD_0443
atgtcgtttgttgatcaccctccagattggttagaagaggttggtgaaggccttcacgagtttttggagctcgaagctggcccacccaaaccgaagcccaaccagcagaagcaagacaacgcccgtggtcttgtactgcctggatataattatctgggacccttcaacggactcgacaagggagagcccgtcaaccgagcggacgccgttgcgcgagagcacgacatctcgtacaacgagcagctccaggcgggagacaacccctacctcaagtacaaccacgcggacgccgagtttcaggagaagctcaaggacgacacctcctttgggggcaacctcggcaaggcaatctttcaggccaaaaaaagggttctcgaaccttttggcctggttgaagctcctgttaagacggctccggcaaagaagagacctgtagagaagtctcctgcggaaccgggctcctcttcaggcatcggaaaggcgggccatcagcctgcgagaaagcgactaaactttggtcagactggcgacgccgactccgccgctgacccccagcctctcggagaaccacccgcagccccctctggtctgggaactggtacgatggcttcaggcggtggcgcaccaatggcagacaataacgaaggcgccgacggagtgggtaatgcctcgggaaattggcattgcgattccacatggctgggcgaccgagtcatcaccaccagcacccgcacctgggccctgcccacctacaacaaccatctctataagcagatctccagtcagtctggagccagcaacgacaaccactactttggctacagcaccccctgggggtactttgacttcaaccgcttccactgccacttctctccgcgagactggcagcgactcatcaacaacaactgggggttccggcccaagcgactcaacttcaagctgtttaacatccaagtcaaggaggtcactcagacggacggcacgaagaccatcgccaataaccttaccagcacggttcaggtctttgcggactcggaataccagctcccatacgtcctcggatcggcgcaccagggctgcttcccgccgttcccggcggacgtcttcatggtcccacagtacgggtacttgacgctgaacaacgggagccaggccatgggccgctcgtccttctactgtctggagtactttccgtcacagatgctgcggacgggaaacaactttacgttcagctatacctttgaggacgtgcccttccacagcagctacgcgcacagccagagcttggaccggctcatgaacccgctcatcgaccagtacctgtactacctgagcaagacgcagaacggcttgggcttttctcaagcggggccctcgaacatgcgggaccagtccaggaactggctaccggggccttgcttcagacagcagcggatctcgaaaacgcctacgcaaaataacactggagactttgcgtggacgggaaccacgaggtaccacctcaacggtcgagactcggtgatgaacccgggtccggctatggccagccacaaagatgacgaagacagattcttccctcaaaacggtgtactcatttttggaaaacaagatgcagaaaaaaacaatgcggtacttgacaaggtgatcatcactgacgaggaggaaatcagaaccacgaaccctgttgccacggaagaatacgggctcgttgctaccagcctccaaaacaatacaaccgcagcagataccgagagggtcaacgcacagggcatcctacccggcatggtgtggcaagaccgagacgtgtatctgcaaggacccatctgggccaagatcccctacacggatggacacttccatccctcgccgctcatgggcgggttcggcctcaagcgcccgcctccgcaaatcctcatcaagaacaccccagtaccagcggatcccgccacgaccttcaacccggcgaagctagcgtcattcatcacgcagtactcgacgggacaggtcagcgtggagatcgagtgggagctgcagaaagagaacagtaagcgctggaaccccgaggtccagtacacgtccaactacaacaagtccgtgaacgtggacttcaccgtggacaccaacggcatgtactcggaaccgcgcaccatcggcacccgctaccttacccgtaacctgtaa

SEQ ID NO: 289 - DNA, 2220 bp, Adeno-Associated Virus
  source 1..2220: mol_type = other DNA; note = BCD_0446
atggctgccgatggttatcttccagattggctcgaggacaacctctctgagggcattcgcgagtggtgggacttgaaacctggagccccgaaacccaaagccaaccagcaaaagcaggacgacggccggggtctggtgcttcctggctacaagtacctcggacccttcaacggactcgacaagggggagcccgtcaacgcggcggacgcagcggccctcgagcacgacaaggcatacgaccagcagctcaaagcgggtgacaatccgtacctgcggtataatcacgccgacgccgagtttcaggagcgtctgcaagaagatacgtcttttgggggcaacctcgggcgagcagtcttccaggccaagaagcgggttctcgaacctctcggtctggttgaggaaggcgctaagacggctcctggaaagaagcgacctctagaaaagactcccaaccagcccacggacactcaggccgccgggcagactccagccaagaaaaggccacagggcgagcaatctggcgactccgctagacggcagctcgactttgatccacagccagcagcacccctcggacaaccccccgcagccccctctcctgtgggatctaatacaatggcttcaggtggtggcggaccaatggcagacgataaccaaggcgccgacggagtgggtaatgcctcgggaaattggcattgcgattccacatggctgggcgacagagtcatcaccaccagcacccgaacctgggtcctgcccacctacaacaaccacatctacaagcaaatctccagcgagacaggagccaccaacgacaaccactacttcggctacagcaccccctgggggtattttgactttaacagattccactgccacttttcaccacgtgactggcagcgactcatcaacaacaactggggattccggcccaagagactcaactttaaaatcttcaacatccaagtcaaagaagtcacgcagatcgagggcggttcgaccatcgccaataaccttaccagcacgattcaggtctttgcggactcggagtatcagctgccctacgtcctcggatcggctcaccagggctgcctcccgccgttcccggccgatgtcttcatgattcctcagtacggatacctgaccctgaacaacggaagccaatcggtgggacgctcttccttttactgcctggaatactttccctcacaaatgctgagaactggtaacaatttttccttcagctatacttttgaaagcgtgcctttccacagcagctacgcgcacagccagagcctggaccgcatcatgaatccccttgtggaccagtacctgtactacctggccagaactcagacgggtaccggaagcaccaccagcaacacgaggcagctgcagttttaccaggccgggccttccaacatggcggaccaatccagaaactggttgcctgggcccacgtaccggcagcagagggtctccaaaactctggaccaaaacagcaacaccaactttgcctggacggcggctagcaaatacaatttgaatggacgtaaatctttgaccaatcccggaatcgccatggctactcacaaggacgacgaggagcgcttcttccctcagcacggggtcctggtatttggaaaaacaaatgctaccaacaagaccaccctggaacatgtcctcgttaccagcgaagaggaaattaaagcgaccaatccggtggcgacagaggagtacgggactgtttccagcaacctgcaatcatctgcggccggacctcagacacagaccgtcaacaaccagggagtacttcctggaatggtttggcaagaccgggacgtgtacctgcagggtcccatctgggccaaaattcctcatacggatggacactttcacccctctcctcttatgggcggctttggactgaaacacccgcctccccagattctcatcaaaaacacgcccgtacctgcgaatcctccagagacttttaccacctccaagtttgccagctacatcacccagtacagcaccggacaggtcagcgtagaaatagaatgggagctgcaaaaggaaaacagcaagcgctggaatcccgagatccagtatacttccaactacgcgaaatccaacaatgtggagttctccgtggacgcagccggtgtttattctgaaccccgccctataggtactcgttaccttacccgcaatctgtaa

SEQ ID NO: 290 - DNA, 2208 bp, Adeno-Associated Virus
  source 1..2208: mol_type = other DNA; note = BCD_0447
atggctgccgatggttatcttccagattggctcgaggacactctctctgaaggaataagacagtggtggaagctcaaacctggccccccaccaccaaagcccgcagagcggcacaaggacgacagcaggggtcttgtgcttcctgggtacaagtacctcggacccttcaacggactcgacaaaggagagccggtcaacgaggcagacgccgcggccctcgagcacgacaaggcctacgaccggcagctcgacagcggagacaacccgtacctcaagtacaatcacgccgacgcggagtttcaggagcgtcttaaagaagatacgtcttttgggggcaacctcggacgagcagtcttccaggcgaaaaagagggttcttgaacctctgggcctggttgaggagcctgttaagacggctccgggaaaaaagaggccggtagagcactctcctgcggagccagattcctcctccggaactggaaagtcgggccaacagcctgcaagaaagagattgaattttggtcagactggagacgcagactccgtacctgacccccagcctctcggacagccaccagcagccccctctggtctgggaactaatacgatggctacaggcagtggcgcaccaatggcagacaataacgagggcgccgacggagtgggtaattcctcgggaaattggcattgcgattccacatggatgggcgacagagtcatcaccaccagcacccgcacctgggctctgcccacctacaacaaccatctgtacaagcagatctccagccagtctggggccagcaacgacaaccactactttggctacagcaccccctgggggtattttgacttcaacagattccactgccacttctccccacgtgactggcaaagactcatcaacaacaactggggattccggcccaagagactcagcttcaagctctttaacattcaagtcaaggaggtcacgcagaatgacggtacgacgacgattgccaataaccttaccagcacggttcaggtgtttactgactcggagtaccagctcccgtacgtcctcggctcggcgcatcaaggatgcctcccgccgtttccagcggacgtcttcatggtcccacagtatggatacctcaccttgaacaacgggagtcaggcggtaggacgctcttcattttactgcctggagtactttccttctcagatgctgcgtactggaaacaactttaccttcagctacacctttgaggacgttcctttccacagcagctacgctcatagccagagtttggaccggctgatgaatcctctgatcgaccagtatctgtattacttgagcaaaacaaacgctccaagcggaaccaccacgatgtccaggcttcagttttctcaggccggagcaagtgacattcgggaccagtctagaaactggcttcctggaccctgttaccgccagcagcgagtatcaaagacagctgcggacaacaacaacagtgattactcgtggactggagctaccaagtaccacctcaatggaagagactctctggtgaatccgggcccagctatggccagccacaaggacgatgaagaaaaatattttcctcagagcggggttctcatctttggaaaacaagactcgggaaaaactaatgtggacattgaaaaggtcatgattacagacgaagaggaaatcaggaccaccaatcccgtggctacggagcagtacggtgctgtatctaccaaccttcaaagcggcaacacacaagcagctacctcagatgtcaacacacaaggcgttcttcctggcatggtctggcaggacagagacgtgtacctgcagggacccatctgggcaaagattccacacacggacggacactttcacccttctcctcttatgggaggatttggactgaagcaccctcccccgcagattctcatcaagaataccccggtacctgcgaatccttctaccaccttcagtgcggcaaagtttgcttctttcatcacacagtactccacggggcaggtcagcgtagagatcgagtgggagctgcagaaagaaaacagcaaacgctggaaccccgagatccagtacacttccaactacaacaagtctgttaatgtggactttactgtggacactaatggcgtgtattcagagcctcgccccattggcacaagatacctgactcgtaatctgtaa

SEQ ID NO: 291 - DNA, 2217 bp, Adeno-Associated Virus
  source 1..2217: mol_type = other DNA; note = BCD_0448
atggctgccgatggttatcttccagattggctcgaggacaacctctctgagggaattcgcgagtggtgggacctgaaacctggagccccgaaacccaaagccaaccagcaaaagcaggacaacggccggggtctggtgcttcctggctacaagtacctcggacccttcaacggactcgacaagggggagcccgttaacgcggcggacgcagcggccctcgagcacgacaaggcctacgaccagcagctcaaagcgggtgacaatccgtacctgcggtataaccacgccgacgccgagtttcaggagcgtctgcaagaagatacgtcttttgggggcaacctcgggcgagcagtcttccaggccaagaagcgggttctcgaacctctcggtctggttgaggaaggcgctaagacggctcctggaaagaagcgacctctagaaaagactcccaaccagcccacggacactcaggccgccgggcagactccagccaagaaaaggccacagggcgagcaatctggcgactccgctagacggcagctcgactttgatccacagccagcagcacccctcggacaaccccccgcagccccctctcctgtgggatctaatacaatggcttcaggtggtggcggaccaatggcagacgataaccaaggcgccgacggagtgggtaatgcctcgggaaattggcattgcgattccacatggctgggcgacagagtcatcaccaccagcacccgcacctgggccctgcccacctacaacaaccacctctacaagcaaatatcaagtcagagcggggccaccaacgacaaccacttcttcggctacagcaccccctgggggtattttgacttcaacagattccactgccacttctcaccacgtgactggcagcgactcatcaacaacaactggggattccggcccagaaagctgcggttcaagttgttcaacatccaggtcaaggaggtcacgcagaatgaaggcaccaagaccatcgccaataaccttaccagcacgattcaggtctttacggactcggaataccagctcccgtacgtcctcggctctgcgcaccagggctgcctgcctccgttcccggcggacgtcttcatgattccccagtacgggtacctgactctgaacaatggcagtcaggccgtgggccgttcctccttctactgcctggagtactttccttctcaaatgctgagaacgggcaacaactttgagttcagctaccagtttgaggacgtgccttttcacagcagctacgcgcacagccaaagcctggaccggctgatgaaccctctcatcgaccagtacctgtactatctgtctcggactcagtccacgggaggtaccacaggaactcagaagttgctattttctcaggccgggcctaataacatgtcggctcaggccaaaaactggctacccgggccctgctaccggcagcaacgcgtctccacaacaaccaaccagaataacaacagcaactttgcctggacgggtgccaccaagtatcatctgaatggcagagactctctggtaaatcctggcgttgccatggctacccacaaggacgacgaggagcgattttttccatccagcggagtcttgatgtttgggaaacagggagctggaaaagacaacgtggactatagcagcgtaatgctaaccagtgaggaagaaattaagaccaccaaccctgtagccacagaagagtacggcgtggtggccgataacctgcaacagcaaaacgtcgctcctattgtaggggccgtcaacagtcaaggagccttacctggcatggtatggcagaaccgggacgtgtacctgcagggtccaatctgggccaagattcctcatacggacggcaactttcatccctcgccgctgatgggaggctttggactgaaacatccgcctcctcagatcctgattaaaaacacacctgttcccgcggatcctccgaccaccttcaatcaggccaagctggcgtcgttcatcacgcagtacagcaccggccaggtcagcgtggagatcgagtgggagctacagaaggagaacagcaagcgctggaacccagaaattcagtacacctccaactactacaaatctacaaatgtggactttgctgtcaatactgagggtacttattctgagcctcgccccattggcactcgttacctcacccgtaatctgtaa

SEQ ID NO: 292 - DNA, 2217 bp, Adeno-Associated Virus
  source 1..2217: mol_type = other DNA; note = BCD_0449
atggctgctgacggttatcttccagattggctcgaggacaacctctctgagggcattcgcgagtggtggaacctgaaacctggagccccgaaacccaaggctaaccagcaaaaacaggaccacggccggggtttggtgcttcctggctacaagtacctcggacccttcaacggactcgacaagggggagcccgtcaacgaggcagacgccgcggccctcgagcacgacaaggcctacgaccagcagctcaaagcgggtgacaatccgtacctgcggtataatcacgccgacgccgagtttcaggagcgtctgcaagaagatacgtcttttgggggcaacctcgggcgcgcagtctttcaggccaaaaagcgggttctcgaacctctgggcctggttgaatcgccggttaaaacggcacctggaaagaagagaccggtagagccctcaccgcagcgttctcccgactcctccacgggcatcggcaagaaaggccagcagcccgcgaaaaagagactcaattttgggcagactggcgactcagagtcagtgcccgaccctcaaccaatcggagaaccaccagcaggcccctctggtctgggatctggtacaatggctgcaggcggtggcgctccaatggcagacaataacgaaggcgccgacggagtgggtagttcctcaggaaattggcattgcgattccacatggctgggcgacagagtcatcaccaccagcacccgaacctgggccctccccacctacaacaaccacctctacaagcaaatctccaacgggacatcgggaggaagcaccaacgacaacacctacttcggctacagcaccccctgggggtattttgactttaacagattccactgccacttctcaccacgtgactggcagcgactcatcaacaacaactggggattccggcccaagagactcaacttcaagctcttcaacatccaggtcaaggaggtcacgcagaatgaaggcaccaagaccatcgccaataaccttaccagcacgattcaggtctttacggactcggaataccagctcccgtacgtcctcggctctgcgcaccagggctgcctgcctccgttcccggcggacgtcttcatgattccccagtacgggtacctgactctgaacaatggcagtcaggccgtgggccgttcctccttctactgcctggagtactttccttctcaaatgctgagaacgggcaacaactttgagttcagctaccagtttgaggacgtgccttttcacagcagctacgcgcacagccaaagcctggaccggctgatgaaccccctcatcgaccagtacctgtactacctgtctcggactcagtccacgggaggtaccgcaggaactcagcagttgctattttctcaggccgggcctaataacatgtcggctcaggccaaaaactggttgcctgggcccatgtaccggcagcaacgcgtctccacgacactgtcgcaaaataacaacagcaactttgcctggaccggtgctaccaagtatcatctgaatggcagagactctctggtaaatcccggtgtcgctatggcaacccacaaggacgacgaggagcgattttttccatccagcggagtcttgatgtttgggaaacagggagctggaaaagacaacgtggactatagcagagtaatgctaaccagtgaggaagaaattaagaccaccaacccagtggccacagaacagtacggcgtggtggccgataacctgcaacagcaaaacgtcgctcctattgtaggggccgtcaacagtcaaggagccttacctggcatggtatggcagaaccgggacgtgtacctgcagggtccaatctgggccaagattcctcatacggacggcaactttcatccctcgccgctgatgggaggctttggactgaaacatccgcctcctcagatcctgattaaaaacacacctgttcccgcggatcctccaactaccttcagtcaagctaagctggcgtcgttcatcacgcagtacagcaccggccaggtcagcgtggaaattgaatgggagctacagaaggagaacagcaagcgctggaacccagaaattcagtacacctccaactactacaaatctacaaatgtggactttgctgtcaatactgatggtaattattctgagcctcgccccattggcactcgttacctcacccgtaatctgtaa

SEQ ID NO: 293 - DNA, 2217 bp, Adeno-Associated Virus
  source 1..2217: mol_type = other DNA; note = BCD_0450
atggctgctgacggttatcttccagattggctcgaggacaacctctctgagggcattcgcgagtggtggaacctgaaacctggagccccgaaacccaaggctaaccagcaaaaacaggaccacggccggggtttggtgcttcctggctacaagtacctcggacccttcaacggactcgacaagggggagcccgtcaacgaggcagacgccgcggccctcgagcacgacaaggcctacgaccagcagctcaaagcgggtgacaatccgtacctgcggtataatcacgccgacgccgagtttcaggagcgtctgcaagaagatacgtcttttgggggcaacctcgggcgcgcagtctttcaggccaaaaagcgggttctcgaacctctgggcctggttgaatcgccggttaaaacggcacctggaaagaagagaccggtagagccctcaccgcagcgttctcccgactcctccacgggcatcggcaagaaaggccagcagcccgcgaaaaagagactcaattttgggcagactggcgactcagagtcagtgcccgaccctcaaccaatcggagaaccaccagcaggcccctctggtctgggatctggtacaatggctgcaggcggtggcgctccaatggcagacaataacgaaggcgccgacggagtgggtagttcctcaggaaattggcattgcgattccacatggctgggcgacagagtcatcaccaccagcacccgaacctgggccctccccacctacaacaaccacctctacaagcaaatctccaacgggacatcgggaggaagcaccaacgacaacacctacttcggctacagcaccccctgggggtattttgactttaacagattccactgccacttctcaccacgtgactggcagcgactcatcaacaacaactggggattccggcccaagagactcaacttcaagctcttcaacatccaggtcaaggaggtcacgcagaatgaaggcaccaagaccatcgccaataaccttaccagcacgattcaggtctttacggactcggaataccagctcccgtacgtcctcggctctgcgcaccagggctgcctgcctccgttcccggcggacgtcttcatgattccccagtacgggtacctgactctgaacaatggcagtcaggccgtgggccgttcctccttctactgcctggagtactttccttctcaaatgctgagaacgggcaacaactttgagttcagctaccagtttgaggacgtgccttttcacagcagctacgcgcacagccaaagcctggaccggctgatgaaccccctcatcgaccagtacctgtactacctgtctcggactcagtccacgggaggtaccgcaggaactcagcagttgctattttctcaggccgggcctaataacatgtcggctcaggccaaaaactggttgcctgggcccatgtaccggcagcaacgcgtctccacgacactgtcgcaaaataacaacagcaactttgcctggaccggtgctaccaagtatcatctgaatggcagagactctctggtaaatcccggtgtcgctatggcaacccacaaggacgacgaggagcgattttttccatccagcggagtcttgatgtttgggaaacagggagctggaaaagacaacgtggcctatagcagcgtaatgctaaccagtgaggaagaaattaagaccaccaaccctgtagccacagaacagtacggcgtggtggccgataacctgcaacagcaaaacgtcgctcctattgtaggggccgtcaacagtcaaggagccttacctggcatggtatggcagaaccgggacgtgtacctgcagggtccaatctgggccaagattcctcatacggacggcaactttcatccctcgccgctgatgggaggctttggactgaaacatccgcctcctcagatcctgattaaaaacacacctgttcccgcggatcctccaactaccttcagtcaagctaagctggcgtcgttcatcacgcagtacagcaccggccaggtcagcgtggaaattgaatgggagctacagaaggagaacagcaagcgctggaacccagaaattcagtacacctccaactactacaaatctacaaatgtggactttgctgtcaatactgatggtaattattctgagcctcgccccattggcactcgttacctcacccgtaatctgtaa

SEQ ID NO: 294 - DNA, 2211 bp, Adeno-Associated Virus
  source 1..2211: mol_type = other DNA; note = BCD_0454
atggctgccgatggttatcttccagattggctcgaggacaacctctctgagggcattcgcgagtggtgggacttgaaacctggagccccgaaacccaaagccaaccagcaaaagcaggacgacggccggggtctggtgcttcctggctacaagtacctcggacccttcaacggactcaacaggggggagcccgtcaacgcggcggacgcagcggccctcgagcacgacaaggcctacgaccagcagctcaaagcgggtgacaatccgtacctgcggtataaccacgccgacgccgagtttcaggagcgtctgcaagaagatacgtcttttgggggcaacctcgggcgagcagtcttccaggccaagaagagggttctcgaaccttttggtctggttgaggaaggtgctaagacggctcctggaaagaaacgtccggtagagcagtcaccccaagaaccagactcctcatcgggcatcggcaaatcaggccagcagcccgctaaaaagagactcaattttggtcagactggcgactcagagtcagtccccgacccacaacctctcggagaacctccagcaacccccgctgctgtgggacctactacaatggcttcaggcggtggcgcaccaatggcagacaataacgaaggcgccgacggagtgggtaatgcctcgggaaattggcattgcgattccacatggctgggcgacagagtcatcaccaccagcacccgaacctgggtcctgcccacctacaacaaccacatctacaagcaaatctccagcgatacaggagccaccaacgacaaccactacttcggctacagcaccccctgggggtattttgactttaacagattccactgccacttttcaccacgtgactggcagcgactcatcaacaacaactggggattccggcccaagagactcaactttaaaatcttcaacatccaagtcaaagaagtcacgcagatcgagggcggttcgaccatcgccaataaccttaccagcacgattcaggtctttgcggactcggagtatcagctgccctacgtcctcggatcggctcaccagggctgcctcccgccgttcccggccgatgtcttcatgattcctcagtacggatacctgaccctgaacaacggaagccaatcggtgggacgctcttccttttactgcctggaatactttccctcacaaatgctgagaactggtaacaatttttccttcagctatacttttgaaagcgtgcctttccacagcagctacgcgcacagccagagcctggaccgcatcatgaatccccttgtggaccagtacctgtactacctggccagaactcagacgggtaccggaagcaccaccagcaacacgaagcagctgcagttttaccaggccgggccttccaacatggcggaccaatccagaaactggttgcctgggcccacgtaccggcagcagagggtctccaaaactctggaccaaaacagcaacaccaactttgcctggacggcggctagcaaatacaatttgaatggacgtaaatctttgaccaatcccggaatcgccatggctactcacaaggacgacgaggagcgcttcttccctcagcacggggtcctggtatttggaaaaacagatgctaccaacaagaccaccctggaaaatgtcctcgttaccagcgaagaggaaattaaagcgaccaatccggtggcgacagaggagtacgggactgtttccagcaacctgcaatcaaacgcaacgaatccaaccacagagtctgtcaacaaccagggagtacttcctggaatggtttggcaagaccgggacgtgtacctgcagggtcccatctgggccaaaattcctcatacggatggacactttcacccctctcctcttatgggcggctttggactgaaacacccgcctccccagattctcatcaaaaacacgcccgtacctgcgaatcctccagagacttttaccacctccaagtttgccagctacatcacccagtacagcaccggacaggtcagcgtagaaatagaatgggagctgcaaaaggaaaacagcaagcgctggaatcccgagatccagtatacttccaactacgcgaaatccaacaatgtggagttctccgtgaacgcagccggtgtttattctgaaccccgccctataggtactcgttaccttacccgcaatctgtaa

SEQ ID NO: 295 - DNA, 2220 bp, Adeno-Associated Virus
  source 1..2220: mol_type = other DNA; note = BCD_0455
atggctgccgatggttatcttccagattggctcgaggacaacctctctgagggaattcgcgagtggtggaacctgaaacctggagccccgaaacccaaagccaaccagcaaaaacaggacaacggccggggtctggtgcttcctggctacaagtacctcggacccttcaacggactcgacaagggggagcccgtcaacgcggcggacgcagcggccctcgagcacgacaaggcctacgaccagcagctcaaagcgggtgacaatccgtacctgcggtataaccacgccgacgccgagtttcaggagcgtctgcaagaagatacgtcttttgggggcaacctcgggcgagcagtcttccaggccaagaagcgggttctcgaacctctcggtctggttgaggaaggcgctaagacggctcctggaaagaagcgacctctagaaaagactcccaaccagcccacggacactcaggccgccgggcagactccagccaagaaaaggccacagggcgagcaatctggcgactccgctagacggcagctcgactttgatccacagccagcagcacccctcggacaaccccccgcagccccctctcctgtgggatctaatacaatggcttcaggtggtggcggaccaatggcagacgataaccaaggcgccgacggagtgggtaatgcctcgggaaattggcattgcgattccacatggctgggcgacagagtcatcaccaccagcacccgaacctgggtcctgcccacctacaacaaccacatctacaagcaaatctccagcgagacaggagccaccaacgacaaccactacttcggctacagcaccccctgggggtattttgactttaacagattccactgccacttttcaccacgtgactggcagcgactcatcaacaacaactggggattccggcccaagagactcaactttaaaatcttcaacatccaagtcaaagaagtcacgcagatcgagggcggttcgaccatcgccaataaccttaccagcacgattcaggtctttgcggactcggagtatcagctgccctacgtcctcggatcggctcaccagggctgcctcccgccgttcccggccgatgtcttcatgattcctcagtacggatacctgaccctgaacaacggaagccaatcggtgggacgctcttccttttactgcctggaatactttccctcacaaatgctgagaactggtaacaatttttccttcagctatacttttgaaagcgtgcctttccacagcagctacgcgcacagccagagcctggaccgcatcatgaatccccttgtggaccagtacctgtactacctggccagaactcagacgggtaccggaagcaccaccagcaacacgaggcagctgcagttttaccaggccgggccttccaacatggcggaccaatccagaaactggttgcctgggcccacgtaccggcagcagagggtctccaaaactctggaccaaaacagcaacaccaactttgcctggacggcggctagcaaatacaatttgaatggacgtaaatctttgaccaatcccggaatcgccatggctactcacaaggacgacgaggagcgcttcttccctcagcacggggtcctggtatttggaaaaacaaatgctaccaacaagaccaccctggaaaatgtcctcgttaccagcgaagaggaaattaaagcgaccaatccggtggcgacagaggagtacgggactgtttccagcaacctgcaatcaaacacaacgaatccaaccacagagtctgtcaacaaccagggagtacttcctggaatggtttggcaagaccgggacgtgtacctgcagggtcccatctgggccaaaattcctcatacggatggacactttcacccctctcctcttatgggcggctttggactgaaacacccgcctccccagattctcatcaaaaacacgcccgtacctgcgaatcctccagagacttttaccacctccaagtttgccagctacatcacccagtacagcaccggacaggtcagcgtagaaatagaatgggagctgcaaaaggaaaacagcaagcgctggaatcccgagatccagtatacttccaactacgcgaaatccaacaatgtggagttctccgtggacgcagccggtgtttattctgaaccccgccctataggtactcgttaccttacccgcaatctgtaa

SEQ ID NO: 296 - DNA, 2181 bp, Adeno-Associated Virus
  source 1..2181: mol_type = other DNA; note = BCD_0459
atgtcgtttgttgatcaccctccagattggttggaagaggttggtgaaggccttcacgagtttttggagctcgaagctggcccacccaaaccgaagcccaaccagcagaagcaggacaacgcccgtggtcttgtactgcctggatataattatctgggacccttcaacggactcgacaagggagagcccgtcaaccgggcagacgaggtcgcgcgagagcacgacatctcgtacaacgagcagctccaggcgggagacaacccctacctcaagtacaaccacgcggacgccgagttccaggagaagctcaaggacgacacctcctttgggggcaacctcggaaaggcaatctttcaggccaagaaaagggttctcgaaccttttggcctggttgaggcacctgttaagacggctccagccaagaagcggccgatagagaagtctcctgcggaaccgagctcttcgaagggcatcggcaaggcgggccagcagcctgcgagaaagcgactcaactttggtcagactggagacaccgactccgccgctgacccccagcctctcggagaaccacccgcagccccctctggtctgggaactggtacgatggcttcaggcggtggcgcaccaatggcagacaataacgaaggcgccgacggagtgggtaatgcctcgggaaattggcattgcgattccacatggctgggcgaccgagtcatcaccaccagcacccgcacctgggccctgcccacctacaacaaccacctctacaagcaaatctccagccagtctggagccagcaatgacaaccactactttggatatagcaccccctgggggtactttgacttcaaccgcttccactgccatttttcgccgcgagactggcagcggctcatcaacaacaactgggggttccgtcccaagcggctcaacttcaagctgtttaacatccaagtcaaggaggtcactcagacggacggcacgaagaccatcgccaataaccttaccagcacggttcaggtctttgcggactcggagtaccagctcccatacgtcctcggatcggcgcaccagggctgcttcccgccgttcccggcggacgtcttcatggttccgcagtacgggtacctcaccctgaacaacggcagccatgccatgggccgttcgtccttctactgcttggagtactttccgtctcagatgctgcggacggggaacaacttcacgttcagttacacgttcgaggacgtgcccttccacagcagctacgcgcacagccagagcctggaccggctgatgaacccgctcatcgaccagtacctgtactacttgagcaagacacaaaacggcttgggcttttctcaggcgggacccaccagcatgcgggaccagtctaggaactggctgccggggccttgcttcagacagcagcgaatatcgaaaacgcccacgcaaaataatactggagactttgcgtggacaggaaccacaaggtaccacctcaacggtcgagactcggtgatgaatccgggcccggccatggccagtcacaaggatgacgaagacagattcttccctcaaaacggtgtactcatttttggaaaacaagatgcagaaaaaaacaatgcggtacttgacaaagtgatcatcactgatgaggaggaaatcagaaccacgaaccctgttgccacggaagaatatgggctcgttgctaccagcctccaaaacaatacaaccgcggcagataccgagagggtcaacgcacagggcattctacccggcatggtgtggcaagaccgagacgtgtatctgcaaggaccaatttgggccaagattccctacacggacggacacttccatccctcgccgctcatgggcgggttcggcctcaagcgtccgcctccgcaaatcctcatcaagaacacccccgtaccagcggatcccgccacgaccttcaacccggcgaagctagcgtccttcatcacgcagtactccacgggccaggtcagcgtggagatcgagtgggagctgcagaaggaaaacagcaagcgctggaaccccgaggtccagtacacctccaattacaacaagtccgtcaacgtggacttcaccgtggacaccaacggcatgtactcggagccgcgcaccatcggaacccgctaccttacccgcaacctgtaa

SEQ ID NO: 297 - DNA, 2184 bp, Adeno-Associated Virus
  source 1..2184: mol_type = other DNA; note = BCD_0461
atgtcgtttgttgatcaccctccagattggttggaagaggttggtgaaggccttcacgagtttttggagctcgaagctggcccacccaaaccgaagcccaaccagcagaagcaggacaacgcccgtggtcttgtactgcctggatataattatctgggacccttcaacggactcgacaagggagagcccgtcaaccgggcagacgaggtcgcgcgagagcacgacatctcgtacaacgagcagctccaggcgggagacaacccctacctcaagtacaaccacgcggacgccgagttccaggagaagctcaaggacgacacctcctttgggggcaacatcggaaaggcaatctttcaggccaagaaaagggttctcgaaccttttggcctggttgaggcacctgttaagacggctccagccaagaagcggccgatagagaagtctcctgcggaaccgagctcttcgaagggcatcggcaaggcgggccagcagcctgcgagaaagcgactcaactttggtcagactggagacaccgactccgccgctgacccccagcctctcggagaaccacccgcagccccctctggtctgggaactggtacgatggcttcaggcggtggcgcaccaatggcagacaataacgaaggcgccgacggagtgggtaatgcctcgggaaattggcattgcgattccacatggctgggcgaccgagtcatcaccaccagcacccgcacctgggccctgcccacctacaacaaccatctctacaagcaaatctcctctagcaattacggagccaacaacgacaaccactactttggctacagcaccccctgggggtactttgacttcaaccgctttcactgccatttttcgccgcgagactggcagcggctcatcaacaacaactgggggttccgtcccaagcggctcaacttcaagctgttcaacattcaagtcaaggaggtcacggaaacggaaggcacgaagaccatcgccaataaccttaccagcacggttcaggtctttgcggattcggagtaccagttgccgtacgtcctcgggtcggcgcaccagggctgcttcccgccgttcccggcggacgtcttcatgatcccgcagtacgggtacctgacgctgaacaacggcagtcaggcgatgggccgctcgtccttctactgcctagagtactttccgtcgcagatgctgcggacggggaacaatttcacattcagctacaccttcgaggacgtgcccttccacagcagctacgcgcacagccagagcctggaccggctaatgaacccgctcatcgaccagtacctgtactacctgagcaagacagccggtggtctggcgttttctcaagcagggcccaccaccatgcggaaccagtccaggaactggctcccgggaccctgcttccgacagcagcgagtttcagaaagatccacagaaaacaacaacggagacttctcgtggacagggaccacgagataccatcttaacggtagagactcggcgatgaatccgggcccggccatggccagccacaaggacgacgaagacaggttcttcccgcagaacggcgtgctcatctttggaacaccgaacgctactgcaagcaatgcacctctagataatgtactgatcacagatgaagaggaaatcagaactacgaaccctgtggccacggaagagtacgggatcgttgctaacaacaaacaggacagcagtacacaagcgacgaccgcgattgtcaacgcacaaggcatcctgcccggcatggtgtggcaggatcgagatgtgtacctgcaggggcccatctgggccaagataccccacacggatggacacttccacccatcaccgctcatgggcggattcggccttaagcatccacctccgcagatcctcatcaagaacacgcctgtgccgtcgaaccctccagaaaagtttacccaggaaaaactcaacgcattcatcacacagtactcgacgggacaggtcagtgtggagatcgagtgggagctgcagaaggagaacagcaagcgctggaaccccgaggtccagtacacctccaattacaacaagtccgtcaacgtggacttcaccgtggacaccaacggcatgtactcggagccgcgcaccatcggaacccgctaccttacccgcaacctgtaa

SEQ ID NO: 298 - DNA, 2184 bp, Adeno-Associated Virus
  source 1..2184: mol_type = other DNA; note = BCD_0462
atgtcgtttgttgatcaccctccagattggttggaagaggttggtgaaggccttcacgagtttttggagctcgaagctggcccacccaaaccgaagcccaaccagcagaagcaggacaacgcccgtggtcttgtactgcctggatataattatctgggacccttcaacggactcgacaagggagagcccgtcaaccgggcagacgaggtcgcgcgagagcacgacatctcgtacaacgagcagctccaggcgggagacaacccctacctcaagtacaaccacgcggacgccgagttccaggagaagctcaaggacgacacctcctttgggggcaacctcggaaaggcaatctttcaggccaagaaaagggttctcgaaccttttggcctggttgaggcacctgttaagacggctccagccaagaagcggccgatagagaagtctcctgcggaaccgagctcttcgaagggcatcggcaaggcgggccagcagcctgcgagaaagcgactcaactttggtcagactggagacaccgactccgccgctgacccccagcctctcggagaaccacccgcagccccctctggtctgggaactggtacgatggcttcaggcggtggcgcaccaatggcagacaataacgaaggcgccgacggagtgggtaatgcctcgggaaattggcattgcgattccacatggctgggcgaccgagtcatcaccaccagcacccgcacctgggccctgcccacctacaacaaccacctctacaagcaaatctcttctagcagtttcggagccaccaatgacgaccactactttggctacagcaccccctgggggtactttgacttcaaccgctttcactgccacttctccccgcgagactggcagcggctcatcaacaacaactgggggttccggcccaagcggctcaacttcaagctgttcaacatccaagttaaggaggttacggacacggacggcacgaagacgatcgccaataaccttaccagcacggttcaggtctttgcggactcggagtaccagctgccgtatgtccttggatcggcgcaccagggctgcttcccgccgttcccggcggatgtcttcatgatcccacagtacgggtacctgaccctgaacaacggcagtcaggcgatgggtcgctcgtccttctactgcctggagtactttccttcacagatgctgcggacggggaacaacttcacgttcagttacacgttcgaggacgttccattccacagcagctacgcgcacagccagagtctagaccggctcatgaatccgctcatcgaccagtacctgtactacctgagcaagacaaatggcggtctggcgttttctcaagcagggcacaccaacatgcggaaccagtccaggaactggcttccgggaccttgcttccgtcaacagcggatctcgaagacacccacagaaaacaataaccaagagttctcctggacaggggctactaagtatcatctaaatggaagagactcggtgatgaacccgggcccggccatggccagtcacaaggacgacgagaacagattctttccgcaaaacggagtgctcatctttggaacaccgaacgctaatgcaaccaatgcacaactaaacgatgtactaatcaccgatgaggaggaaatcagaactacgaaccctgtggccacagaagagtacggcatcgttgccaataacaaacagagctccagcacacaggcgacgaccacgaatgtcaatgcgcaaggcatccttccaggcatggtgtggcaggaccgagacgtgtacctgcaggggcccatctgggccaagataccccacacggatggacacttccacccatcaccgctcatgggcgggttcggccttaagcacccacctccgcagatcctcatcaagaatactcctgtgccgtcgaaccctccagaaacgttcaagcaggaaaaactcaacgcattcatcacacagtactcgacgggacaggtcagtgtggagatcgagtgggagctgcagaaggagaacagcaagcgctggaaccccgaggtccagtacacctccaattacaacaagtccgtcaacgtagacttcaccgtggacaccaacggtgtgtactcggagccccgcaccatcggcacccgctaccttacccgcaacctgtaa

SEQ ID NO: 299 - DNA, 2181 bp, Adeno-Associated Virus
  source 1..2181: mol_type = other DNA; note = BCD_0466
atgtcgtttgttgatcaccctccagattggttggaagaggttggtgaaggccttcacgagtttttggagctcgaagctggcccacccaaaccgaagcccaaccagcagaagcaggacaacgcccgtggtcttgtactgcctggatataattatctgggacccttcaacggactcgacaagggagagcccgtcaaccgggcagacgaggtcgcgcgagagcacgacatctcgtacaacgagcagctccaggcgggagacaacccctacctcaagtacaaccacgcggacgccgagttccaggagaagctcaaggacgacacctcctttgggggcaacctcggaaaggcaatctttcaggccaagaaaagggttctcgaaccttttggcctggttgaggcacctgttaagacggctccagccaagaagcggccgatagagaagtctcctgcggaaccgagctcttcgaagggcatcggcaaggcgggccagcagcctgcgagaaagcgactcaactttggtcagactggagacaccgactccgccgctgacccccagcctctcggagaaccacccgcagccccctctggtctgggaactggtacgatggcttcaggcggtggcgcaccaatggcagacaataacgaaggcgccgacggagtgggtaatgcctcgggaaattggcattgcgattccacatggctgggcgaccgagtcatcaccaccagcacccgcacctgggccctgcccacctacaacaaccatctctacaagcaaatctccagccagtctggagccaacaacgacaaccactactttggatatagcaccccctgggggtactttgacttcaaccgcttccactgccacttctccccgcgagactggcagcggctcatcaacaacaactggggcttccggcccaagcgactcaacttcaagctgtttaacatccaagtcaaggaggtcacggagaatgaaggtaccaagacgatcgccaataaccttaccagcacggttcaggtctttgcggactcggagtaccagctgccgtacgtcctcggctcggcgcaccagggctgcttcccgccgttcccggcggacgtcttcatggtcccgcagtacgggtacctgacgctaaacaacggcagccatgccatgggccgttcttccttctactgcctggagtactttccgtcgcaaatgctgcggacgggaaacaatttcacgttcagctacaccttcgaggacgtgcccttccacagcagctacgcgcacagtcagagtctggaccggctgatgaacccgctcatcgaccagtacctgtactacctgagcaagacgcagaacggcctggcgttctctcaggcgggacccaacagcatgcgggaccagtctagaaactggctcccggggccttgcttccgacaacaacggatctcgaagacgtcaacacaaaacaacaacaatgaatttgcgtggacgggagccacaaaatatcatctcaatggaagaaactcggcgatgaacccaggtccagccatggccagccacaaggacgacgaacacaggttcttccctcagaatggtgtgctcatctttggaaaacagggcgcagacaagaccaatgcgatactcgacaaagtgatagttaccgacgaagaggagattagggctacgaaccctgtggccacggaggagtacggagtcgtcgctacaaatctccagaacggcaatacgcaggcgacgaccaacgacgtcaacgcacaaggcattcttccaggcatggtgtggcaggacagagacgtgtaccttcagggacccatatgggccaagatccctcacacggacggacacttccacccgtctcctctcatgggcggattcggactcaagcacccgcccccgcagattctcatcaagaacacacctgtaccttcgaatcctccagatacattcaacccggaaaagctcaattcttttataactcaatattcaacgggccaggtcagtgtggagatcgagtgggagctgcagaaggaaaacagcaagcgctggaaccccgaggtccagtacacgtccaactacgacaagtccgtcaacgtggacttcacagtgaacggggatggcgtgtactcggaaccgcgaaccatcggaacccgctaccttacccgcaacctgtaa

SEQ ID NO: 300 - DNA, 2184 bp, Adeno-Associated Virus
  source 1..2184: mol_type = other DNA; note = BCD_0467
atgtcgtttgttgatcaccctccagattggttggaagaggttggtgaaggccttcacgagtttttggagctcgaagctggcccacccaaaccgaagcccaaccagcagaagcaggacaacgcccgtggtcttgtactgcctggatataattatctgggacccttcaacggactcgacaagggagagcccgtcaaccgggcagacgaggtcgcgcgagagcacgacatctcgtacaacgagcagctccaggcgggagacaacccctacctcaagtacaaccacgcggacgccgagttccaggagaagctcaaggacgacacctcctttgggggcaacctcggaaaggcaatctttcaggccaagaaaagggttctcgaaccttttggcctggttgaggcacctgttaagacggctccagccaagaagcggccgatagagaagtctcctgcggaaccgagctcttcgaagggcatcggcaaggcgggccagcagcctgcgagaaagcgactcaactttggtcagactggagacaccgactccgccgctgacccccagcctctcggagaaccacccgcagccccctctggtctgggaactggtacgatggcttcaggcggtggcgcaccaatggcagacaataacgaaggcgccgacggagtgggtaatgcctcgggaaattggcattgcgattccacatggctgggcgaccgagtcatcaccaccagcacccgcacctgggccctgcccacctacaacaaccacctctacaagcaaatctcttctagcagtttcggagccaccaatgacgaccactactttggctacagcaccccctgggggtactttgacttcaaccgctttcactgccacttctccccgcgagactggcagcggctcatcaacaacaactggggcttccggcccaagcgactcaacttcaagctgtttaacatccaagtcaaggaggtcacggagaatgaaggtaccaagacgatcgccaataaccttaccagcacggttcaggtctttgcggactcggagtaccagctgccgtacgtcctcggctcggcgcaccagggctgcttcccgccgttcccggcggacgtcttcatggtcccgcagtacgggtacctgacgctaaacaacggcagccatgccatgggccgttcttccttctactgcctggagtactttccgtcgcaaatgctgcggacgggaaacaatttcacgttcagctacaccttcgaggacgtgcccttccacagcagctacgcgcacagtcagagtctggaccggctcatgaatccgctcatcgaccagtacctgtactacctgagcaagacaaatggcggtctggcgttttctcaagcagggcacaccaacatgcggaaccagtccaggaactggcttccgggaccttgcttccgtcaacagcggatctcgaagacacccacagaaaacaataaccaagagttctcctggacaggggctactaagtatcatctaaatggaagagactcggtgatgaacccgggcccggccatggccagtcacaaggacgacgaagacaggttcttccctcagaatggcgtgctcatctttggaacacagaacgctgctgcaaccaatgcactgctaaacgatgtactgatcaccgatgaggaggaaatcagaactacgaaccctgtggccacagaagagtacggaattgttgccaataacaaacagagctccagcatacaggcgacgaccacaaatgtcaatgcgcaaggcatccttccaggcatggtgtggcaggaccgagacgtgtacctgcaggggcccatctgggccaagataccccacacggatggacacttccacccatcaccgctcatgggcgggttcggccttaagcacccacctccgcagatcctcatcaagaatactcctgtgccgtcgaaccctccagaaacgttcaagcaggaaaaactcaacgcattcatcacacagtactcgacgggacaggtcagtgtggagatcgagtgggagctgcagaaggagaacagcaagcgctggaaccccgaggtccagtacacctccaattacaacaagtccgtcaacgtagacttcaccgtggacaccaacggtgtgtactcggagccccgcaccatcggcacccgctaccttacccgcaacctgtaa

SEQ ID NO: 301 - DNA, 2181 bp, Adeno-Associated Virus
  source 1..2181: mol_type = other DNA; note = BCD_0468
atgtcgtttgttgatcaccctccagattggttggaagaggttggtgaaggccttcacgagtttttggagctcgaagctggcccacccaaaccgaagcccaaccagcagaagcaggacaacgcccgtggtcttgtactgcctggatataattatctgggacccttcaacggactcgacaagggagagcccgtcaaccgggcagacgaggtcgcgcgagagcacgacatctcgtacaacgagcagctccaggcgggagacaacccctacctcaagtacaaccacgcggacgccgagttccaggagaagctcaaggacgacacctcctttgggggcaacctcggaaaggcaatctttcaggccaagaaaagggttctcgaaccttttggcctggttgaggcacctgttaagacggctccagccaagaagcggccgatagagaagtctcctgcggaaccgagctcttcgaagggcatcggcaaggcgggccagcagcctgcgagaaagcgactcaactttggtcagactggagacaccgactccgccgctgacccccagcctctcggagaaccacccgcagccccctctggtctgggaactggtacgatggcttcaggcggtggcgcaccaatggcagacaataacgaaggcgccgacggagtgggtaatgcctcgggaaattggcattgcgattccacatggctgggcgaccgagtcatcaccaccagcacccgcacctgggccctgcccacctacaacaaccatctctacaagcaaatctccagccagtctggagccaacaacgacaaccactactttggatatagcaccccctgggggtactttgacttcaaccgcttccactgccacttctccccgcgagactggcagcggctcatcaacaacaactggggcttccggcccaagcgactcaacttcaagctgtttaacatccaagtcaaggaggtcacggagaatgaaggtaccaagacgatcgccaataaccttaccagcacggttcaggtctttgcggactcggagtaccagctgccgtacgtcctcggctcggcgcaccagggctgcttcccgccgttcccggcggacgtcttcatggtcccgcagtacgggtacctgacgctaaacaacggcagccatgccatgggccgttcttccttctactgcctggagtactttccgtcgcaaatgctgcggacgggaaacaatttcacgttcagctacaccttcgaggacgtgcccttccacagcagctacgcgcacagtcagagtctggaccggctgatgaacccgctcatcgaccagtacctgtactacctgagcaagacgcagaacggcctggcgttctctcaggcgggacccaacagcatgcgggaccagtctagaaactggctcccgggaccttgcttccgtcaacagcggatctcgaagacacccacagaaaacaataaccaagagttctcctggacaggggctactaagtatcatctaaatggaagagactcggtgatgaacccgggcccggccatggccagtcacaaggacgacgagaacagattctttccgcaaaacggagtgctcatctttggaacaccgaacgctaatgcaaccaatgcacaactaaacgatgtactaatcaccgatgaggaggaaatcagaactacgaaccctgtggccacagaagagtacggcatcgttgccaataacaaacagagctccagcacacaggcgacgaccacgaatgtcaatgcgcaaggcatccttccaggcatggtgtggcaggaccgagacgtgtacctgcaggggcccatctgggccaagataccccacacggatggacacttccacccatcaccgctcatgggcgggttcggccttaagcacccacctccgcagatcctcatcaagaatactcctgtgccgtcgaaccctccagaaacgttcaagcaggaaaagctcaatgccttcatcacacagtactccacgggacaggtcagcgtggaaatcgagtgggagctgcagaaggagaacagcaagcgctggaaccccgaggtccagtacacctccaattacaacaagtccgtcaacgtagacttcaccgtggacaccaacggtgtgtactcggagccccgcaccatcggcacccgctaccttacccgcaacctgtaa

SEQ ID NO: 302 - DNA, 2205 bp, Adeno-Associated Virus
  source 1..2205: mol_type = other DNA; note = BCD_0485
atggctgccgatggttatcttccagattggctcgaggacaacctctctgagggcattcgcgagtggtgggctttgaaacctggagccccgaagccgaaagccaaccagcaaaagcaggacgacggccggggtctggtgcttcctggctacaagtacctcggacccttcaacggactcgacaagggggagcccgtcaacgcggcggacgcagcggccctcgagcacgacaaggcctacgaccagcagctgcaggcgggtgacaatccgtacctgcggtataaccacgccgacgccgagtttcaggagcgtctgcaagaagatacgtcttttgggggcaacctcgggcgagcagtcttccaggccaagaagcgggttctcgaacctctcggtctggttgaggaaggcgctaagacggctcctggaaagaagagaccggtagagccatcacctcagcgttctccagactcctcgacgggcatcggcaaaaaaggcccacagcccgctagaaaaagactgaactttgggcagactggcgactcagagtcagctccagaccctcaacctctcggagaacctccagcagcgccctcaagtgtgggacctgttacaatggctgcaggcggtggcgcaccaatggcagataataacgagggcgccgacggagtgggtaatgcctcgggaaattggcattgcgattccacatggctgggcgacagagtcatcaccaccagcacccgaacctgggccctgcccacctacaacaaccacctctacaagcaaatctccagcagcagctcgggagccaccaacgacaaccactacttcggctacagcaccccctgggggtattttgacttcaacagattccactgccatttctcaccacgtgactggcagcgactcatcaacaacaactggggattccggcccaagagactcaacttcaagctgttcaacatccaggtcaaggaggtcacgacgaacgacggcgtcacgaccatcgctaataaccttaccagcacggttcaggtattctcggactcggagtaccagctgccgtacgtcctcggctcggcccaccagggctgcctgcctccgttcccggcggacgtgttcatgattccccagtacggctacctgacgctgaacaacggaagccaatccgtgggacgttcatccttctactgcctggaatactttccctcgcagatgctgagaaccggcaacaactttcagttcagctacaccttcgaggatgtgcctttccacagcagctacgcgcacagtcagagcctggaccggctgatgaatcccctgattgaccagtacctgtattatctggccagaacgcagagcaccacgggatctacgagagaactgcagtttcatcaggctgggcccaataccatggcagaacaggctaaaaactggctgcccgggccctgctaccgacagcagcgtgtttctaaagtactggatcaaaacccaaacagcaattttgcttggactgctgccacaaaatatcatttaaatggcagagactctttggctaatcctggtatcgccatggctaccaacaaggacgatgaggacagattctttccaattaatggaactataatatttggaaaaacgggagcttccaacaaaacaacgctagaaaacgttctaatgaccagcgaagaagaaattaggcctaccaatcctgtggctacagaagaatatggcgttgtttccagcaatctacaagcttccaatacaaaccctacatcacaaactgtcaacaaccaaggagccttacccggaatggtctggcagaaccgggacgtgtacctgcagggtcccatctgggccaagattcctcacacggacggcaactttcacccgtctccgctgatgggcggctttggcctgaagcatccgccgcctcagattctgatcaaaaacacgcctgttcctgctaatcctccagaggtttttactccttccaagtttgcctcgttcatcacacagtacagcaccggtcaggtcagcgtggaaatcgaatgggagctgcagaaggagaacagcaagcgctggaaccccgagatccagtacacttccaactttgacaaatccaacagtgtggacttttctgtggacgcccagggcgtgtactctgaaccccgccccattggcacccgttacctcacccgtaatctgtaa

SEQ ID NO: 303 - DNA, 2217 bp, Adeno-Associated Virus
  source 1..2217: mol_type = other DNA; note = BCD_0486
atggctgccgatggttatcttccagattggctcgaggacaacctctctgagggcattcgcgagtggtgggctttgaaacctggagccccgaagccgaaagccaaccagcaaaagcaggacaacggccggggtctggtgcttcctggctacaagtacctcggacccttcaacggactcgacaagggggagcccgtcaacgcggcagacgcagcggccctcgagcacgacaaggcctacgaccagcagctgcaggcgggtgacaatccgtacctgcggtataaccacgccgacgccgagtttcaggagcgtctgcaagaagatacgtcttttgggggcaacctcgggcgagcagtcttccaggccaagaagcgggttctcgaacctctcggtctggttgaggaaggcgctaagacggctcctggaaagaagagaccggtagagccatcacctcagcgttctccagactcctcgacgggcatcggcaaaaaaggcccacagcccgctagaaaaagactgaactttgggcagactggcgactcagagtcagctccagaccctcaacctctcggagaacctccagcagcgccctctggtgtgggatctaatacaatggctgcaggcggtggcgcaccaatggcagacaataacgaaggtgccgacggagtgggtagttcctcgggaaattggcattgcgattccacatggctgggcgacagagtcatcactaccagcacccgaacctgggccttgcccacctacaacaaccacctctacaagcaaatatccaacgggacatcgggaggagccaccaacgacaacacatatttcggctacagcaccccctgggggtattttgacttcaacagattccactgccatttctcaccacgtgactggcagcgactcatcaacaacaactggggattccggcccaagagactcaacttcaagctcttcaacatccaggtcaaggaggtcacgcagaatgaaggcaccaagaccatcgccaataatctcaccagcaccatccaggtgtttacggactcggagtaccagctgccgtacgtcctcggatcggcccaccagggctgcctgcctccgttcccggcggacgtgttcatgattccccagtacggctacctgacgctgaacaacgggagtcaggccgtgggacgttcatccttctactgcctggaatactttccctcgcagatgctgagaaccggcaacaactttcagttcagctacaccttcgaggatgtgcctttccatagcagctacgcgcacagtcagagcctggaccggctgatgaatcccctgattgaccagtatctgtactacctgtctcggactcaaacaacgggaggcactgctaacacgcagactttgggtttcagccaaggagggcccaacaccatggccaatcaggccaagaactggctgcccgggccctgttatcgccaacaacgcgtctccacgacaaccgggcaaaacaacaacagcaactttgcttggactgctggcaccaaataccacctgaatggaagaaattcattggctaatcccggcatcgccatggcaacacacaaggatgacgaggagcggttctttcccagcaacggcatcttaatttttgggaaacagaacgctgccagagacaatgcagactacagcgatgttatgctcaccagcgaggaggagattaaaactacgaacccggtggccacagaggaatacggtatcgtggccgataacttgcagcagcaaaacacggctcctcaaaccggaactgtcaacagccaaggggccttacccggtatggtctggcagaaccgggacgtgtacctgcagggtccaatctgggccaagattcctcacacggatggcaactttcatccttctccgctgatgggcggctttggcctgaagcatcctccgcctcagatcctgattaaaaacactcctgttcctgccgatcctccgaccaccttcaaccaggccaagctgaactctttcatcacgcagtacagcaccggacaggtcagcgtggagatcgaatgggagctgcagaaggagaacagcaagcgctggaaccccgaaattcagtacacctccaactactacaaatctacaaatgtggactttgccgttaatactgaaggtgtttactctgaaccccgccccattggcacccgttacctcacccgtaatctgtaa

SEQ ID NO: 304 - DNA, 2217 bp, Adeno-Associated Virus
  source 1..2217: mol_type = other DNA; note = BCD_0487
atggctgccgatggttatcttccagattggctcgaggacaacctctctgagggcattcgcgagtggtgggctttgaaacctggagccccgaagccgaaagccaaccagcaaaagcaggacgacggccggggtctggtgcttcctggctacaagtacctcggacccttcaacggactcgacaagggggagcccgtcaacgcggcggacgcagcggccctcgagcacgacaaggcctacgaccagcagctgcaggcgggtgacaatccgtacctgcggtataaccacgccgacgccgagtttcaggagcgtctgcaagaagatacgtcttttgggggcaacctcgggcgagcagtcttccaggccaagaagcgggttctcgaacctctcggtctggttgaggaaggcgctaagacggctcctggaaagaagagaccggtagagccatcacctcagcgttctccagactcctcgacgggcatcggcaaaaaaggcccacagcccgctagaaaaagactgaactttgggcagactggcgactcagagtcagctccagaccctcaacctctcggagaacctccagcagcgccctctggtgtgggatctaatacaatggctgcaggcggtggcgcaccaatggcagacaataacgaaggtgccgacggagtgggtagttcctcgggaaattggcattgcgattccacatggctgggcgacagagtcatcactaccagcacccgaacctgggccttgcccacctacaacaaccacctctacaagcaaatatccaacgggacatcgggaggagccaccaacgacaacacatatttcggctacagcaccccctgggggtattttgacttcaacagattccactgccatttctcaccacgtgactggcagcgactcatcaacaacaactggggattccggcccaagagactcaacttcaagctcttcaacatccaggtcaaggaggtcacgcagaatgaaggcaccaagaccatcgccaataatctcaccagcaccatccaggtgtttacggactcggagtaccagctgccgtacgtcctcggatcggcccaccagggctgcctgcctccgttcccggcggacgtgttcatgattccccagtacggctacctgacgctgaacaacgggagtcaggccgtgggacgttcatccttctactgcctggaatactttccctcgcagatgctgagaaccggcaacaactttcagttcagctacaccttcgaggatgtgcctttccatagcagctacgcgcacagtcagagcctggaccggctgatgaatcccctgattgaccagtatctgtactacctgtctcggactcaaacaacgggaggcactgctaacacgcagactttgggtttcagccaaggagggcccaacaccatggccaatcaggccaagaactggctgcccgggccctgttatcgccaacaacgcgtctccacgacaaccgggcaaaacaacaacagcaactttgcttggactgctggcaccaaataccacctgaatggaagaaattcattggctaatcccggcatcgccatggcaacacacaaggatgacgaggagcggttctttcccagcaacggcatcttaatttttgggaaacagaacgctgccagagacaatgcagactacagcgatgttatgctcaccagcgaggaggagattaaaactacgaacccggtggccacagaggaatacggtatcgtggccgataacttgcagcagcaaaacacggctcctcaaaccggaactgtcaacagccaaggggccttacccggtatggtctggcagaaccgggacgtgtacctgcagggtccaatctgggccaagattcctcacacggatggcaactttcatccttctccgctgatgggcggctttggcctgaagcatcctccgcctcagatcctgattaaaaacactcctgttcctgccgatcctccgaccaccttcaaccaggccaagctgaactctttcatcacgcagtacagcaccggacaggtcagcgtggagatcgaatgggagctgcagaaggagaacagcaagcgctggaaccccgaaattcagtacacctccaactactacaaatctacaaatgtggactttgccgttaatactgaaggtgtttactctgaaccccgccccattggcacccgttacctcacccgtaatctgtaa

SEQ ID NO: 305 - DNA, 2217 bp, Adeno-Associated Virus
  source 1..2217: mol_type = other DNA; note = BCD_0488
atggctgccgatggttatcttccagattggctcgaggacaacctctctgagggcattcgcgagtggtgggctttgaaacctggagccccgaagccgaaagccaaccagcaaaagcaggacaacggccggggtctggtgcttcctggctacaagtacctcggacccttcaacggactcgacaagggggagcccgtcaacgcggcagacgcagcggccctcgagcacgacaaggcctacgaccagcagctgcaggcgggtgacaatccgtacctgcggtataaccacgccgacgccgagtttcaggagcgtctgcaagaagatacgtcttttgggggcaacctcgggcgagcagtcttccaggccaagaagcgggttctcgaacctctcggtctggttgaggaaggcgctaagacggctcctggaaagaagagaccggtagagccatcacctcagcgttctccagactcctcgacgggcatcggcaaaaaaggcccacagcccgctagaaaaagactgaactttgggcagactggcgactcagagtcagctccagaccctcaacctctcggagaacctccagcagcgccctctggtgtgggatctaatacaatggctgcaggcggtggcgcaccaatggcagacaataacgaaggtgccgacggagtgggtagttcctcgggaaattggcattgcgattccacatggctgggcgacagagtcatcaccaccagcacccgaacctgggccttgcccacctacaacaaccacctctacaagcaaatatccaacgggacatcgggaggagccaccaacgacaacacatatttcggctacagcaccccctgggggtattttgacttcaacagattccactgccatttctcaccacgtgactggcagcgactcatcaacaacaactggggattccggcccaagagactcaacttcaagctcttcaacatccaggtcaaggaggtcacgcagaatgaaggcaccaagaccatcgccaataatctcaccagcaccatccaggtgtttacggactcggagtaccagctgccgtacgtcctcggatcggcccaccagggctgcctgcctccgttcccggcggacgtgttcatgattccccagtacggctacctgacgctgaacaacgggagtcaggccgtgggacgttcatccttctactgcctggaatactttccctcgcagatgctgagaaccggcaacaactttcagttcagctacaccttcgaggatgtgcctttccatagcagctacgcgcacagtcagagcctggaccggctgatgaatcccctgattgaccagtatctgtactacctgtctcggactcaaacaacgggaggcactgctaacacgcagactttgggtttcagccaaggagggcccaacaccatggccaatcaggccaagaactggctgcccgggccctgttatcgccaacaacgcgtctccacgacaaccgggcaaaacaacaacagcaactttgcttggactgctggcaccaaataccacctgaatggaagaaattcattggctaatcccggcatcgccatggcaacacacaaggatgacgaggagcggttctttcccagcaacggcatcttaatttttgggaaacagaacgctgccagagacaatgcagactacagcgatgttatgctcaccagcgaggaggagattaaaactacgaacccggtggccacagaggaatacggtatcgtggccgataacttgcagcagcaaaacacggctcctcaaaccggaactgtcaacagccaaggggccttacccggtatggtctggcagaaccgggacgtgtacctgcagggtccaatctgggccaagattcctcacacggatggcaactttcatccttctccgctgatgggcggctttggcctgaagcatcctccgcctcagatcctgattaaaaacactcctgttcctgccgatcctccgaccaccttcaaccaggccaagctgaactctttcatcacgcagtacagcaccggacaggtcagcgtggagatcgaatgggagctgcagaaggagaacagcaagcgctggaaccccgagatccagtacacttccaactttgacaaatccaacagtgtggacttttctgtggacgcccagggcgtgtactctgaaccccgccccattggcacccgttacctcacccgtaatctgtaa

SEQ ID NO: 306 - DNA, 2190 bp, Adeno-Associated Virus
  source 1..2190: mol_type = other DNA; note = BCD_0489
atggctgccgatggttatcttccagattggctcgaggacaacctctctgagggcattcgcgagtggtgggctttgaaacctggagccccgaagccgaaagccaaccagcaaaagcaggacgacggccggggtctggtgcttcctggctacaagtacctcggacccttcaacggactcgacaagggggagcccgtcaacgcggcggacgcagcggccctcgagcacgacaaggcctacgaccagcagctgcaggcgggtgacaatccgtacctgcggtataaccacgccgacgccgagtttcaggagcgtctgcaagaagatacgtcttttgggggcaacctcgggcgagcagtcttccaggccaagaagcgggttctcgaacctctcggtctggttgaggaaggcgctaagacggctcctggaaagaagagacccatagaatcccccgactcctcttcgggcatcggcaaaaaaggccagcagcccgctaaaaagaaactgaactttgggcagactggcgaatcagagtcagtgcccgaacctcaacctctcggagaacctccagcagcgccctcaagtgtgggacctgttacaatggctgcaggcggtggcgcaccaatggcagataataacgagggcgccgacggagtgggtaatgcctcgggaaattggcattgcgattccacatggctgggcgacagagtcatcaccaccagcacccgaacctgggccctgcccacctacaacaaccacctctacaagcaaatctccagcagcagctcgggagccaccaacgacaaccactacttcggctacagcaccccctgggggtattttgacttcaacagattccactgccatttctcaccacgtgactggcagcgactcatcaacaacaactggggattccggcccaagagactcaacttcaagctgttcaacatccaggtcaaggaggtcacgacgaacgacggcgtcacgaccatcgctaataaccttaccagcacggttcaggtattctcggactcggagtaccagctgccgtacgtcctcggctcggcccaccagggctgcctgcctccgttcccggcggacgtgttcatgattccccagtacggctacctgacgctgaacaacggaagccaatccgtgggacgttcatccttctactgcctggaatactttccctcgcagatgctgagaaccggcaacaactttcagttcagctacaccttcgaggatgtgcctttccacagcagctacgcgcacagtcagagcctggaccggctgatgaatcccctgattgaccagtacctgtattatctggccagaacgcagagcaccacgggatctacgagagaactgcagtttcatcaggctgggcccaataccatggcagaacaggctaaaaactggctgcccgggccctgctaccgacagcagcgtgtttctaaagtactggatcaaaacccaaacagcaattttgcttggactgctgccacaaaatatcatttaaatggcagagactctttggctaatcctggtatcgccatggctaccaacaaggacgatgaggacagattctttccaattaatggaactataatatttggaaaaacgggagcttccaacaaaacaacgctagaaaacgttctaatgaccagcgaagaagaaattaggcctaccaatcctgtggctacagaagaatatggcgttgtttccagcaatctacaagcttccaatacaaaccctacatcacaaactgtcaacaaccaaggagccttacccggaatggtctggcagaaccgggacgtgtacctgcagggtcccatctgggccaagattcctcacacggacggcaactttcacccgtctccgctgatgggcggctttggcctgaagcatccgccgcctcagattctgatcaaaaacacgcctgttcctgctaatcctccagaggtttttactccttccaagtttgcctcgttcatcacacagtacagcaccggtcaggtcagcgtggaaatcgaatgggagctgcagaaggagaacagcaagcgctggaaccccgagatccagtacacttccaactttgacaaatccaacagtgtggacttttctgtggacgcccagggcgtgtactctgaaccccgccccattggcacccgttacctcacccgtaatctgtaa

SEQ ID NO: 307 - DNA, 2184 bp, Adeno-Associated Virus
  source 1..2184: mol_type = other DNA; note = BCD_0492
atgtcgtttgttgatcaccctccagattggttggaagaggttggtgaaggccttcacgagtttttggagctcgaagctggcccacccaaaccgaagcccaaccagcagaagcaggacaacgcccgtggccttgtactgcctggatataattatctgggacccttcaacggactcgacaagggagagcccgtcaaccgagcggacgctgttgcgcgagagcacgacatctcgtacaacgagcagctccaggcgggagacaacccctacctcaagtacaaccacgcggacgccgagtttcaggagaagctcgcagacgacacctcctttgggggcaacctcggaaaggcaatctttcaggccaagaaaagggttctcgaaccttttggcctggttgaagcgcctgttaagacggctccagccaagaagcggccgatagagaagtctcctgcggaaccgagctcttcgaagggcatcggcaaggcgggccagcagcctgcgagaaagcggctcaactttggtcagactggagacaccgactccgcccctgacccccagcctctcggagaaccaccagcagccccctctggtctgggaactggtacgatggcttcaggcggtggcgcaccaatggcagacaataacgaaggcgccgacggagtgggtaatgcctcgggaaattggcattgcgattccacatggctgggcgaccgagtcatcaccaccagcacccgcacctgggccctgcccacctacaacaaccacctctacaagcaaatctcctctagcagtttcggagccacaaatgacgaccactactttggatacagcaccccctgggggtactttgacttcaaccgcttccactgccacttctccccgcgagactggcagcggctcatcaacaacaactgggggttccggcctaagcgactcaacttcaagctgtttaacatccaagtcaaggaggtcacggacacggacggcacgaagaccatcgccaataaccttaccagcacggttcaggtctttgcggactcggagtaccagctcccatacgtcctcggatcggcgcaccagggctgcttcccgccgttcccggcggacgtcttcatgatcccgcagtacgggtatctgacgctgaacaacggcagtcaggccatgggccgctcgtccttctactgcctggagtactttccgtcgcagatgctgcggacggggaacaacttcacattcagctacactttcgaggacgtgcccttccacagcagctacgcgcacagccagagcctggaccggctcatgaatccgctcatcgaccagtatctgtactacctgagcaagacaaatggcggtctggcgttttctcaagcagggcacaccaacatgcggaaccagtccaggaactggctcccggggccctgcttccgtcaacagcggatctcgaagacacctacagaaaacaataaccaagagttctcgtggacgggagccacaaaatatcatctcaatggaagagactcggtgatgaacccgggcccggccatggccagtcacaaggacgacgagaacagattctttccgcaaaacggagtgctcatctttggaacaccaaacgctaatgcaaccaatacacaactaaacgatgtactgatcaccgatgaggaggaaatcagaactacgaacccggttgcaacagaagagtatggcatcgttgccaataacaaacagagctccagcacacaggcgacgaccacgaatgtcaatgcgcaaggcatcctgcccggcatggtgtggcaagatcgagacgtgtacctgcaggggcccatctgggccaagataccccacacggatggacacttccacccatcacctctcatgggcgggttcggccttaagcatccacctccgcaaatcctcattaagaacacgcccgtgccgtcgaaccctccagaaacgttcaagcaggataagctcaatgccttcatcacgcagtactcgacgggacaagtcagtgtggagatcgagtgggagctgcagaaggagaacagcaagcgctggaaccccgaggtccagtacacgtccaactacaacaagtccgtgaacgtggacttcaccgtggacaccaacggcgtgtactcagagccccgcaccatcggtacccgctaccttacccgcaacctgtaa

SEQ ID NO: 308 - DNA, 2214 bp, Adeno-Associated Virus
  source 1..2214: mol_type = other DNA; note = BMN_0208
atggctgccgatggttatcttccagattggctcgaggacaacctctctgagggcattcgcgagtggtgggcgctgaaacctggagccccgaaacccaaagccaaccagcaaaagcaggacgacggccggggtctggtgcttcctggctacaagtacctcggacccttcaacggactcgacaagggggagcccgtcaacgcggcggacgcagcggccctcgagcacgacaaggcctacgaccagcagctgcaggcgggtgacaatccgtacctgcggtataaccacgccgacgccgagtttcaggagcgtctgcaagaagatacgtcttttgggggcaacctcgggcgagcagtcttccaggccaagaagcgggttctcgaacctctcggtctggtggaggaaggcgctaagacggctcctggaaagaagagaccagtagagcagtcaccccaagagccagactcatcctcgggcatcggcaagaaaggccagcagcccgctaaaaagagactcaactttggtcagactggcgactcagagtcagtccccgaccctcaacctctcggagaacctccagcagcgccctctagtttgggacttaatacaatggctgcaggcggtggcgcaccaatggcagacaataacgaaggcgccgacggagtgggtagttcctcgggaaattggcattgcgattccacacggctgggcgacagagtcatcaccaccagcacccggacctgggccctacccacctacaacaaccacctctacaagcaaatctccaacggcacctcgggaggaagtacaaatgacaacacctacttcggctacagcaccccctgggggtattttgacttcaacagattccactgccacttttcaccacgtgactggcagcgactcatcaacaacaactgggggttccggcccaagaagctcagcttcaagctcttcaacatccaggtcaaggaggtcacgcagaatgaaggcaccaagaccatcgccaataacctcaccagcaccatccaggtgtttacggactcggaataccagctgtcgtacgtcctcggctccgcgcaccagggctgcctccctccgttcccggcggacgtcttcatgatcccgcagtacggctacctgactctgaacaatggcagccaggccgtgggccgttcctccttctactgcctggaatattttccatcacagatgctgagaacaggcaacaacttttcgttcagctacaccttcgaggacgtgcctttccacagcagctacgcgcacagccagagcctggaccgtctgatgaatcctctcatcgatcagtacctgtactacctgtcaagaacccaatccacgggaggcacggctggaactcagcagctgttgttttctcaggcgggtcccaataacatgtcggctcaggccaagaactggctacccgggcccatgtaccggcagcaacgcgtttccacgacactgtcgcaaaataacaacagcaactttgcctggactggaggcactaaatatcacctgaacggcagagactcactggtgaacccaggtgtagccatggcaaccaacaaggacgacgaggaccgcttttttccatctagcggagtactcatgtttggtaaacaaggagctggaaaagacaacgtggattacagcagcgtcatgctaaccagcgaagaggaaatcaagaccaccaatcccgtggctacagaacagtacggggtagtagccgacaacttacaacaacagaatacggctcctattgttggagcggtaaacagccaggaagccttacccggcatggtctggcagaaccgggacgtgtacctgcagggtcccatctgggccaagattccccacacggacggcaactttcacccgtctcccctgatgggcggatttggactcaaacatccacctcctcagatcctgatcaaaaacaccccggtacctgccgatcctccaactgccttcaatcaagccaaactcaactccttcatcacgcagtacagcaccggccaggtcagcgtggaaatcgagtgggagctgcagaaggagaacagcaagcgctggaacccagagattcagtatacctccaactactacaaatctacaaatgtggactttgctgtcgatactgagggtgtttattctgagcatcgccccattggcactcgttacctcacccgtaatctgtaa

SEQ ID NO: 309 - DNA, 2214 bp, Adeno-Associated Virus
  source 1..2214: mol_type = other DNA; note = BMN_0209
atggctgccgatggttatcttccagattggctcgaggacaacctctctgagggcattcgcgagtggtgggcgctgaaacctggagccccgaaacccaaagccaaccagcaaaagcaggacgacggccggggtctggtgcttcctggctacaagtacctcggacccttcaacggactcgacaagggggagcccgtcaacgcggcggacgcagcggccctcgagcacgacaaggcctacgaccagcagctgcaggcgggtgacaatccgtacctgcggtataaccacgccgacgccgagtttcaggagcgtctgcaagaagatacgtcttttgggggcaacctcgggcgagcagtcttccaggccaagaagcgggttctcgaacctctcggtctggtggaggaaggcgctaagacggctcctggaaagaagagaccagtagagcagtcaccccaagagccagactcatcctcgggcatcggcaagaaaggccagcagcccgctaaaaagagactcaactttggtcagactggcgactcagagtcagtccccgaccctcaacctctcggagaacctccagcagcgccctctagtttgggacttaatacaatggctgcaggcggtggcgcaccaatggcagacaataacgaaggcgccgacggagtgggtagttcctcgggaaattggcattgcgattccacatggctgggcgacagagtcatcaccaccagcacccggacctgggccctacccacctacaacaaccacctctacaagcaaatctccaacggcacctcgggaggaagtacaaatgacaacacctacttcggctacagcaccccctgggggtattttgacttcaacagattccactgccacttttcaccacgtgactggcagcgactcatcaacaacaactgggggttccggcccaagaagctcagcttcaagctcttcaacatccaggtcaaggaggtcacgcagaatgaaggcaccaagaccatcgccaataacctcaccagcaccatccaggtgtttacggactcggaataccagctgccgtacgtccccggctccgcgcaccagggctgcctccctccgttcccggcggacgtcttcatgatcccgcagtacggctacctgactctgaacaatggcagccaggccgtgggccgttcctccttctactgcctggaatattttccatcacagatgctgagaacaggcaacaacttttcgttcagctacaccttcgaggacgtgcctttccacagcagctacgcgcacagccagagcctggaccgtctgatgaatcctctcatcgatcagtacctgtactacctgtcaagaacccaatccacgggaggcacggctggaactcagcagctgttgttttctcaggcgggtcccaataacatgtcggctcaggccaagaactggctacccgggcccatgtaccggcagcaacgcgtttccacgacactgtcgcaaaataacaacagcaactttgcctggactggaggcactaaatatcacctgaacggcagagactcactggtgaacccaggtgtagccatggcaaccaacaaggacgacgaggaccgcttttttccatctagcggagtactcatgtttggtaaacaaggagctggaaaagacaacgtggattacagcagcgtcatgctaaccagcgaagaggaaatcaagaccaccaatcccgtggctacagaacagtacggggtagtagccgacaacttacaacaacagaatacggctcctattgttggagcggtaaacagccagggagccttacccggcatggtctggcagaaccgggacgtgtacccgcagggtcccatctgggccaagattccccacacggacggcaactttcacccgtctcccctgatgggcggatttggactcaaacatccacctcctcagatcctgatcaaaaacaccccggtacctgccgatcctccaactgccttcaatcaagccaaactcaactccttcatcacgcagtacagcaccggccaggtcagcgtggaaatcgagtgggagctgcagaaggagaacagcaagcgctggaacccagagattcagtatacctccaactactacaaatctacaaatgtggactttgctgtcaatactgagggtgtttattctgagcctcgccccattggcactcgttacctcacccgtaatctgtaa

SEQ ID NO: 310 - DNA, 2214 bp, Adeno-Associated Virus
  source 1..2214: mol_type = other DNA; note = BMN_0210
atggctgccgatggttatcttccagattggctcgaggacaacctctctgagggcattcgcgagtggtgggcgctgaaacctggagccccgaaacccaaagccaaccagcaaaagcaggacgacggccggggtctggtgcttcctggctacaagtacctcggacccttcaacggactcgacaagggggagcccgtcaacgcggcggacgcagcggccctcgagcacgacaaggcctacgaccagcagctgcaggcgggtgacaatccgtacctgcggtataaccacgccgacgccgagtttcaggagcgtctgcaagaagatacgtcttttgggggcaacctcgggcgagcagtcttccaggccaagaagcgggttctcgaacctcccggtctggtggaggaaggcgctaagacggctcctggaaagaagagaccagtagagcagtcaccccaagagccagactcatcctcgggcatcggcaagaaaggccagcagcccgctaaaaagagactcaactttggtcagactggcgactcagagtcagtccccgaccctcaacctctcggagaacctccagcagcgccctctagtttgggacttaatacaatggctgcaggcggtggcgcaccaatggcagacaataacgaaggcgccgacggagtgggtagttcctcgggaaattggcattgcgattccacatggctgggcgacagagtcatcaccaccagcacccggacctgggccctacccacctacaacaaccacctctacaagcaaatctccaacggcacctcgggaggaagtacaaatgacaacacctacttcggctacagcaccccctgggggtattttgacttcaacagattccactgccacttttcaccacgtgactggcagcgactcatcaacaacaactgggggttccggcccaagaagctcagcttcaagctcttcaacatccaggtcaaggaggtcacgcagaatgaaggcaccaagaccatcgccaataacctcaccagcaccatccaggtgtttacggactcggaataccagctgccgtacgtcctcggctccgcgcaccagggctgcctccctccgttcccggcggacgtcttcatgatcccgcagtacggctacctgactctgaacaatggcagccaggccgtgggccgttccttcttctactgcctggaatattttccatcacagatgctgagaacaggcaacaacttttcgttcagctacaccttcgaggacgtgcctttccacagcagctacgcgcacagccagagcctggaccgtctgatgaatcctctcatcgatcagtacctgtactacctgtcaagaacccaatccacgggaggcacggctggaactcagcagctgttgttttctcaggcgggtcccaataacatgtcggctcaggccaagaactggctacccgggcccatgtaccggcagcaacgcgtttccacgacactgtcgcaaaataacaacagcaactttgcctggactggaggcactaaatatcacctgaacggcagagactcactggtgaacccaggtgtagccatggcaaccaacaaggacgacgaggaccgcttttttccatctagcggagtactcatgtttggtaaacaaggagctggaaaagacaacgtggattacagcagcgtcatgctaaccagcgaagaggaaatcaagaccaccaatcccgtggctacagaacagtacggggtagtagccgacaacttacaacaacagaatacggctcctattgttggagcggtaaacagccagggagccttacccggcatggtctggcagaaccgggacgtgtacctgcagggtcccatctgggccaagattccccacacggacggcaactttcacccgtctcccctgatgggcggatttggactcaaacatccacctcctcagatcctgatcaaaaacaccccggtacctgccgatcctccaactgccttcaatcaagccaaactcaactccttcatcacgcagtacagcaccggccaggtcagcgtggaaatcgagcgggagctgcagaaggagaacagcaagcgctggaacccagagattcagtatacctccaactactacaaatctacaaatgtggactttgctgtcaatactgagggtgtttattctgagcctcgccccattggcactcgttacctcacccgtaatctgtaa

SEQ ID NO: 311 - DNA, 2214 bp, Adeno-Associated Virus
  source 1..2214: mol_type = other DNA; note = BMN_0211
atggctgccgatggttatcttccagattggctcgaggacaacctctctgagggcattcgcgagtggtgggcgctgaaacctggagccccgaaacccaaagccaaccagcaaaagcaggacgacggccggggtctggtgcttcctggctacaagtacctcggacccttcaacggactcgacaagggggagcccgtcaacgcggcggacgcagcggccctcgagcacgacaaggcctacgaccagcagctgcaggcgggtgacaatccgtacctgcggtataaccacgccgacgccgagtttcaggagcgtctgcaagaagatacgtcttttgggggcaacctcgggcgagcagtcttccaggccaagaagcgggttctcgaacctctcggtctggtggaggaaggcgctaagacggctcctggaaaggagagaccagtagagcagtcaccccaagagccagactcatcctcgggcatcggcaagaaaggccagcagcccgctaaaaagagactcaactttggtcagactggcgactcagagtcagtccccgaccctcaacctctcggagaacctccagcagcgccctctagtttgggacttaatacaatggctgcaggcggtggcgcaccaatggcagacaataacgaaggcgccgacggagtgggtagttcctcgggaaattggcattgcgattccacatggctgggcgacagagtcatcaccaccagcacccggacctgggccctacccacctacaacaaccacctctacaagcaaatctccaacggcacctcgggaggaagtacaaatgacaacacctacttcggctacagcaccccctgggggtattttgacttcaacagattccactgccacttttcaccacgtgactggcagcgactcatcaacaacaactgggggttccggcccaagaagctcagcttcaagctcttcaacatccaggtcaaggaggtcacgcagaatgaaggcaccaagaccatcgccaataacctcaccagcaccatccaggtgtttacggactcggaataccagctgccgtacgtcctcggctccgcgcaccagggctgcctccctccgttcccggcggacgtcttcatgatcccgcagtacggctacctgactctgaacaatggcagccaggccgtgggccgttcctccttctactgcctggaatattttccatcacagatgctgagaacaggcaacaacttttcgttcagctacaccttcgaggacgtgcctttccacagcagctacgcgcacagccagagcctggaccgtctgatgaatcctctcatcgatcagtacctgtactacctgtcaagaacccaatccacgggaggcacggctggaactcagcagctgttgttttctcaggcgggtcccaataacatgtcggctcaggccaagaactggctacccgggcccatgtaccggcagcaacgcgtttccacgacactgtcgcaaaataacaacagcaactttgcctggactggaggcactaaatatcacctgaacggcagagactcactggtgaacccaggtgtagccatggcaaccaacaaggacgacgaggaccgcttttttccatctagcgcagtactcatgtttggtaaacaaggagctggaaaagacaacgtggattacagcagcgtcatgctaaccagcgaagaggaaatcaagaccaccaatcccgtgactacagaacagtacggggtagtagccgacaacttacaacaacagaatacggctcctattgttggagcggtaaacagccagggagccttacccggcatggtctggcagaaccgggacgtgtacctgcagggtcccatctgggccaagattccccacacggacggcaactttcacccgtctcccctgatgggcggatttggactcaaacatccacctcctcagatcctgatcaaaaacaccccggtacctgccgatcctccaactgccttcaatcaagccaaactcaactccttcatcacgcagtacagcaccggccaggtcagcgtggaaatcgagtgggagctgcagaaggagaacagcaagcgctggaacccagagattcagtatacctccaactactacaaatctacaaatgtggactttgctgtcaatactgagagtgtttattctgagcctcgccccattggcactcgttacctcacccgtaatctgtaa

SEQ ID NO: 312 - DNA, 2214 bp, Adeno-Associated Virus
  source 1..2214: mol_type = other DNA; note = BMN_0212
atggctgccgatggttatcttccagattggctcgaggacaacctctctgagggcattcgcgagtggtgggcgctgaaacctggagccccgaaacccaaagccaaccagcaaaagcaggacgacggccggggtctggtgcttcctggctacaagtacctcggacccttcaacggacccgacaagggggagcccgtcaacgcggcggacgcagcggccctcgagcacgacaaggcctacgaccagcagctgcaggcgggtgacaatccgtacctgcggtataaccacgccgacgccgagtttcaggagcgtctgcaagaagatacgtcttttgggggcaacctcgggcgagcagtcttccaggccaagaagcgggttctcgaacctctcggtctggtggaggaaggcgctaagacggctcctggaaagaagagaccagtagagcagtcaccccaagagccagactcatcctcgggcatcggcaagaaaggccagcagcccgctaaaaagagactcaactttggtcagactggcgactcagagtcagtccccgaccctcaacctctcggagaacctccagcagcgccctctagtttgggacttaatacaatggctgcaggcggtggcgcaccaatggcagacaataacgaaggcgccgacggagtgggtagttcctcgggaaattggcattgcgattccacatggctgggcgacagagtcatcaccaccagcacccggacctgggccctacccacctacaacaaccacctctacaagcaaatctccaacggcacctcgggaggaagtacaaatgacaacacctacttcggctacagcaccccctgggggtattttgacttcaacagatcccactgccacttttcaccacgtgactggcagcgactcatcaacaacaactgggggttccggcccaagaagctcagcttcaagctcttcaacatccaggtcaaggaggtcacgcagaatgaaggcaccaagaccatcgccaataacctcaccagcaccatccaggtgtttacggactcggaataccagctgccgtacgtcctcggctccgcgcaccagggctgcctccctccgttcccggcggacgtcttcatgatcccgcagtacggctacctgactctgaacaatggcagccaggccgtgggccgttcctccttctactgcctggaatattttccatcacagatgctgagaacaggcaacaacttttcgttcagctacaccttcgaggacgtgcctttccacagcagctacgcgcacagccagagcctggaccgtctgatgaatcctctcatcgatcagtacctgtactacctgtcaagaacccaatccacgggaggcacggctggaactcagcagctgttgttttctcaggcgggtcccaataacatgtcggctcaggccaagaactggctacccgggcccatgtaccggcagcaacgcgtttccacgacactgtcgcaaaataacaacagcaactttgcctggactggaggcactaaatatcacctgaacggcagagactcactggtgaacccaggtgtagccatggcaaccaacaaggacgacgaggaccgcttttttccatctagcggagtactcatgtttggtaaacaaggagctggaaaagacaacgtggattacagcagcgtcatgctaaccagcgaagaggaaatcaggaccaccaatcccgtggctacagaacagtacggggtagtagccgacaacttacaacaacagaatacggctcctattgttggagcggtaaacagccagggagccttacccggcatggtctggcagaaccgggacgtgtacctgcagggtcccatctgggccaagattccccacacggacggcaactttcacccgtctcccctgatgggcggatttggactcaaacatccacctcctcagatcctgatcaaaaacaccccggtacctgccgatcctccaactgccttcaatcaagccaaacttaactccttcatcacgcagtacagcaccggccaggtcagcgtggaaatcgagtgggagctgcagaaggagaacagcaagcgctggaacccagagattcagtatacctccaactactacaagtctacaaatgtggactttgctgtcaatactgagggtgtttattctgagcctcgccccattggcactcgttacctcacccgtaatctgtaa

SEQ ID NO: 313 - DNA, 2214 bp, Adeno-Associated Virus
  source 1..2214: mol_type = other DNA; note = BMN_0213
atggctgccgatggttatcttccagattggctcgaggacaacctctctgagggcattcgcgagtggtgggcgctgaaacctggagccccgaaacccaaagccaaccagcaaaagcaggacgacggccggggcctggtgcttcctggctacaagtacctcggacccttcaacggactcgacaagggggagcccgtcaacgcggcggacgcagcggccctcgagcacgacaaggcctacgaccagcagctgcaggcgggtgacaatccgtacctgcggtataaccacgccgacgccgagtttcaggagcgtctgcaagaagatacgtcttttgggggcaacctcgggcgagcagtcttccaggccaagaagcgggttctcgaacctctcggtctggtggaggaaggcgctaagacggctcctggaaagaagagaccagtagagcagtcaccccaagagccagactcatcctcgggcatcggcaagaaaggccagcagcccgctaaaaagagactcaactttggtcagactggcgactcagagtcagtccccgaccctcaacctctcggagaacctccagcagcgccctctagtttgggacttaatacaatggctgcaggcggtggcgcaccaatggcagacaataacgaaggcgccgacggagtgggtagttcctcgggaaattggcattgcgattccacatggctgggcgacagagtcatcaccaccagcacccggacctgggccctacccacctacaacaaccacctctacaagcaaatctccaacggcacctcgggaggaagtacaaatgacaacacctacttcggctacagcaccccctgggggtattttgacttcaacagattccactgccacttttcaccacgtgactggcagcgactcatcaacaacaactgggggttccggcccaagaagctcagcttcaagctcttcaacatccaggtcaaggaggtcacgcagaatgaaggcaccaagaccatcgccaataacctcaccagcaccatccaggtgtttacggactcggaataccagctgccgtacgtcctcggctccgcgcaccagggctgcctccctccgttcccggcggacgtcttcatgatcccgcagtacggctacctgactctgaacaatggcagccaggccgtgggccgttcctccttctactgcctggaatattttccatcacagatgctgagaacaggcaacaacttttcgttcagctacaccttcgaggacgtgcctttccacagcagctacgcgcacagccagagcctggaccgtctgatgaatcctctcatcgatcagtacctgtactacctgtcaagaacccaatccacgggaggcacggctggaactcagcagctgttgttttctcaggcgggtcccaataacatgtcggctcaggccaagaactggctacccgggcccatgtaccggcagcaacgcgtttccacgacactgtcgcaaaataacaacagcaactttgcctggactggaggcactaaatatcacctgaacggcagagactcactggtgaacccaggtgtagccatggcaaccaacaaggacgacgaggaccgcctttttccatctagcggagtactcatgtttggtaaacaaggagctggaaaagacaacgtggattacagcagcgtcatgctaaccagcgaagaggaagtcaagaccaccaatcccgtggctacagaacagtacggggtagtagccgacaacttacaacaacagaatacggctcctattgttggagcggtaaacagccagggagccttacccggcatggtctggcagaaccgggacgtgtacctgcagggtcccatctgggccaagattccccacacggacggcaactttcacccgtctcccctgatgggcggatttggactcaaacatccacctcctcagatcctgatcaaaaacaccccggtacctgccgatcctccaactgccttcaatcaagccaaactcaactccttcatcacgcagtacagcaccggccaggtcagcgtggaaatcgagtgggagctgcagaaggagaacagcaagcgctggaacccagagattcagtatacctccaactactacaaatctacaaatgtggactttgctgtcaatactgagggtgtttattctgagcctcgccccattggcactcgttacctcacccgtaatctgtaa

SEQ ID NO: 314 - DNA, 2214 bp, Adeno-Associated Virus
  source 1..2214: mol_type = other DNA; note = BMN_0214
atggctgccgatggttatcttccagattggctcgaggacaacctctctgagggcattcgcgagtggtgggcgctgaaacctggagccccgaaacccaaagccaaccagcaaaagcaggacgacggccggggtctggtgcttcctggctacaagtacctcggacccttcaacggactcgacaagggggagcccgtcaacgcggcggacgcagcggccctcgagcacgacaaggcctacgaccagcagctgcaggcgggtgacaatccgtacctgcggtataaccacgccgacgccgagtttcaggagcgtctgcaagaagatacgtcttttgggggcaacctcgggcgagcagtcttccaggccaagaggcgggttctcgaacctctcggtctggtggaggaaggcgctaagacggctcctggaaagaagagaccagtagagcagtcaccccaagagccagactcatcctcgggcatcggcaagaaaggccagcagcccgctaaaaagagactcaactttggtcagactggcgactcagagtcagtccccgaccctcaacctctcggagaacctccagcagcgccctctagtttgggacttaatacaatggctgcaggcggtggcgcaccaatggcagacaataacgaaggcgccgacggagtgggtagttcctcgggaaattggcattgcgattccacatggctgggcgacagagtcatcaccaccagcacccggacctgggccctacccacctacaacaaccacctctacaagcaaatctccaacggcacctcgggaggaagtacaaatgacaacacctacttcggctacagcaccccctgggggtattttgacttcaacagattccactgccacttttcaccacgtgactggcagcgactcatcaacaacaactgggggttccggcccaagaagctcagcttcaagctcttcaacatccaggtcaaggaggtcacgcagaatgaaggcaccaagaccatcgccaataacctcaccagcaccatccaggtgtttacggactcggaataccagctgccgtacgtcctcggctccgcgcgccagggctgcctccctccgttcccggcggacgtcttcatgatcccgcagtacggctacctgactctgaacaatggcagccaggccgtgggccgttcctccttctactgcctggaatattttccatcacagatgctgagaacaggcaacaacttttcgttcagctacaccttcgaggacgtgcctttccacagcagctacgcgcacagccagagcctggaccgtctgatgaatcctctcatcgatcagtacctgtactacctgtcaagaacccaatccacgggaggcacggctggaactcagcagctgttgttttctcaggcgggtcccaataacatgtcggctcaggccaagaactggctacccgggcccatgtaccggcagcaacgcgtttccacgacactgtcgcaaaataacaacagcaactttgcctggactggaggcactaaatatcacctgaacggcagagactcactggtgaacccaggtgtagccatggcaaccaacaaggacgacgaggaccgcttttttccatctagcggagtactcatgtttggtaaacaaggagctggaaaagacaacgtggattacagcagcgtcatgctaaccagcgaagaggaaatcaagaccaccaatcccgtggctacagaacagtacggggtagtagccgacaacttacaacaacagaatacggctcctattgttggagcggtaaacagccagggagccttacccggcatggtctggcagaaccgggacgtgtacctgcagggtcccatctgggccaagattccccacacggacggcaactttcacccgtctcccctgatgggcggatttggactcaaacatccacctcctcagatcctgatcaaaaacaccccggtacctgccgatcctccaactgccttcaatcaagccaaactcaactccttcatcacgcagtacagcaccggccaggtcagcgtggaaatcgagtgggagctgcagaaggagaacagcaagcgctggaacccagagattcagtatacctccaactactacaaatctacaaatgtggactttgctgtcgatactgagggtgtttattctgagcctcgccccattggcactcgttacctcacccgtaatctgtaa

SEQ ID NO: 315 - DNA, 2214 bp, Adeno-Associated Virus
  source 1..2214: mol_type = other DNA; note = BMN_0215
atggctgccgatggttatcttccagattggctcgaggacaacctctctgagggcattcgcgagtggtgggcgctgaaacctggagccccgaaacccaaagccaaccagcaaaagcaggacgacggccggggtctggtgcttcctggctacaagtacctcggacccttcaacggactcgacaagggggagcccgtcaacgcggcggacgcagcggccctcgagcacgacaaggcctacgaccagcagctgcaggcgggtgacaatccgtacctgcggtataaccacgccgacgccgagtttcaggagcgtctgcaagaagatacgtcttttgggggcaacctcgggcgagcagtcttccaggccaagaagcgggttctcgaacctctcggtctggtggaggaaggcgctaagacggctcctggaaagaagagaccagtagagcagtcaccccaagagccagactcatcctcgggcatcggcaagaaaggccagcagcccgctaaaaagagactcaactttggtcagactggcgactcagagtcagtccccgaccctcaacctctcggagaacctccagcagcgccctctagtttgggacttaatacaatggctgcaggcggtggcgcaccaatggcagacaataacgaaggcgccgacggagtgggtagttcctcgggaaattggcattgcgattccacatggctgggcgacagagtcatcaccaccagcacccggacctgggccctacccacctacaacaaccacctctacaagcaaatctccaacggcacctcgggaggaagtacaaatgacaacacctacttcggctacagcaccccctgggggtattttgacttcaacagattccactgccacttttcaccacgtgactggcagcgactcatcaacaacaactgggggttccggcccaagaagctcagcttcaagctcttcgacatccaggtcaaggaggtcacgcagaatgaaggcaccaagaccatcgccaataacctcaccagcaccatccaggtgtttacggactcggaataccagctgccgtacgtcctcggctccgcgcaccagggctgcctccctccgttcccggcggacgtcttcatgatcccgcagtacggctacctgactctgaacaatggcagccaggccgtgggccgttcctccttctactgcctggaatattttccatcacagatgctgagaacaggcaacaacttttcgttcagctacaccttcgaggacgtgcctttccacagcagctacgcgcacagccagagcctggaccgtctgatgaatcctctcatcgatcagtacctgtactacctgtcaagaacccaatccacgggaggcacggctggaactcagcagctgttgttttctcaggcgggtcccaataacatgtcggctcaggccaagaactggctacccgggcccatgtaccggcagcaacgcgtttccacgacactgtcgcaaaataacaacagcaactttgcctggactggaggcactaaatatcacctgaacggcagagactcactggtgaacccaggtgtagccatggcaaccaacaaggacgacgaggaccgcttttttccatctagcggagtactcatgtttggtaaacaaggagctggaaaagacaacgtggattacagcagcgtcatgctaaccagcgaagaggaaatcaagaccaccaatcccgtggctacagaacagtacggggtagtagccgacaacttacaacaacagaatacggctcctattgttggagcggtaaacagccagggagccttacccggcatggtctggcagaaccgggacgtgtacctgcagggtcccatctgggccaagattccccacacggacggcaactttcacccgtctcccctgatgggcggatttggactcaaacatccacctcctcagatcctgatcaaaaacaccccggtacctgccgatcctccaactgccttcaatcaagccaaactcaactccttcatcacgcagtacagcaccggccaggtcagcgtggaaatcgagtgggagctgcagaaggagaacagcaagcgctggaacccagagattcagtatacctccaactactacaaatctacaaatgtggactttgctgtcaatactgagggtgtttattctgagcctcgccccattggcactcgttacctcacccgtaatctgtaa

SEQ ID NO: 316 - DNA, 2214 bp, Adeno-Associated Virus
  source 1..2214: mol_type = other DNA; note = BMN_0216
atggctgccgatggttatcttccagattggctcgaggacaacctctctgagggcattcgcgagtggtgggcgctgaaacctggagccccgaaacccaaggccaaccagcaaaagcaggacgacggccggggtctggtgcttcctggctacaagtacctcggacccttcaacggactcgacaagggggagcccgtcaacgcggcggacgcagcggccctcgagcacgacaaggcctacgaccagcagctgcaggcgggtgacaatccgtacctgcggtataaccacgccgacgccgagtttcaggagcgtctgcaagaagatacgtcttttgggggcaacctcgggcgagcagtcttccaggccaagaagcgggttctcgaacctctcggtctggtggaggaaggcgctaagacggctcctggaaagaagagaccagtagagcagtcaccccaagagccagactcatcctcgggcatcggcaagaaaggccagcagcccgctaaaaagagactcaactttggtcagactggcgactcagagtcagtccccgaccctcaacctctcggagaacctccagcagcgccctctagtttgggacttaatacaatggctgcaggcggtggcgcaccaatggcagacaataacgaaggcgccgacggagtgggtagttcctcgggaaattggcattgcgattccacatggctgggcgacagagtcatcaccaccagcacccggacctgggccctacccacctacaacaaccacctctacaagcaaatctccaacggcacctcgggaggaagtacaaatgacaacacctacttcggctacagcaccccctgggggtattttgacttcaacagattccactgccacttttcaccacgtgactggcagcgactcatcaacaacaactgggggttccggcccaagaagctcagcttcaagctcttcaacatccaggtcaaggaggtcacgcagaatgaaggcaccaagaccatcgccaataacctcaccagcaccatccaggtgtttacggactcggaataccagctgccgtacgtcctcggctccgcgcaccagggctgcctccctccgttcccggcggacgtcttcatgatcccgcagtacggctacctgactctgaacaatggcagccaggccgtgggccgttcctccttctactgcctggaatattttccatcacagatgctgagaacaggcaacaacttttcgttcagctacaccttcgaggacgtgcctttccacagcagctacgcgcacagccagagcctggaccgtctgatgaatcctctcatcgatcagtacctgtactacctgtcaagaacccaatccacgggaggcacggctggaactcagcagctgttgttttctcaggcgggtcccaataacatgtcggctcaggccaagaactggctacccgggcccatgtaccggcagcaacgcgtttccacgacactgtcgcaaaataacaacagcaactttgcctggactggaggcactaaatatcacctgaacggcagagactcactggtgaacccaggtgtagccatggcaaccaacaaggacgacgaggaccgcttttttccatctagcgcagtactcatgtttggtaaacaaggagctggaaaagacaacgtggattacagcagcgtcatgctaaccagcgaagaggaaatcaagaccaccaatcccgtggctacagaacagtacggggtagtagccgacaacttacaacaacagaatacggctcctattgttggagcggtaaacagccagggagccttacccggcatggtctggcagaaccgggacgtgtacctgcagggtcccatctgggccaagattccccacacggacggcaactttcacccgtctcccctgatgggcggatttggactcaaacatccacctcctcagatcctgatcaaaaacaccccggtacctgccgatcctccaactgccttcaatcaagccaaactcaactccttcatcacgcagtacagcaccggccaggtcagcgtggaaatcgagtgggagctgcagaaggagaacagcaagcgctggaacccagagattcagtatacctccaactactacaaatctacaaatgtggactttgctgtcaatactgagagtgtttattctgagcctcgccccattggcactcgttacctcacccgtaatctgtaa

SEQ ID NO: 317 - DNA, 2214 bp, Adeno-Associated Virus
  source 1..2214: mol_type = other DNA; note = BMN_0217
atggctgccgatggttatcttccagattggctcgaggacaacctctctgagggcattcgcgagtggtgggcgctgaaacctggagccccgaaacccaaagccaaccagcaaaagcaggacgacggccggggtctggtgcttcctggctacaagtacctcggacccttcaacggactcgacaagggggagcccgtcaacgcggcggacgcagcggccctcgagcacgacaaggcctacgaccagcagctgcaggcgggtgacaatccgtacctgcggtataaccacgccgacgccgagtttcaggagcgtctgcaagaagatacgtcttttgggggcaacctcgggcgagcagtcttccaggccaagaagcgggttctcgaacctctcggtctggtggaggaaggcgctaagacggctcctggaaagaagagaccagtagagcagtcaccccaagagccagactcatcctcgggcatcggcaagaaaggccagcagcccgctaaaaagagactcaactttggtcagactggcgactcagagtcagtccccgaccctcaacctctcggagaacctccagcagcgccctctagtttgggacttaatacaatggctgcaggcggtggcgcaccaatggcagacaataacgaaggcgccgacggagtgggtagttcctcgggaaattggcattgcgattccacatggctgggcgacagagtcatcaccaccagcacccggacctgggccctacccacctacaacaaccacctctacaagcaaatctccaacggcacctcgggaggaagtacaaatgacaacacctacttcggctacagcaccccctgggggtattttgacttcaacagattccactgccacttttcaccacgtgactggcagcgactcatcaacaacaactgggggttccggcccaagaagctcagcttcaagctcttcaacatccaggtcaaggaggtcacgcagaatgaaggcaccaagaccatcgccaataacctcaccagcaccatccaggtgtttacggactcggaataccagctgccgtacgtcctcggctccgcgcaccagggctgcctccctccgttcccggcggacgtcttcatgatcccgcagtacggctacctgactctgaacaatggcagccaggccgtgggccgttcctccttctactgcctggaatattttccatcacagatgctgagaacaggcaacaacttttcgttcagctacaccttcgaggacgtgcctttccacagcagctacgcgcacagccagagcctggaccgtctgatgaatcctctcatcgatcagtacctgtactacctgtcaagaacccaatccacgggaggcacggctggaactcagcagctgttgttttctcaggcgggtcccaataacatgtcggctcaggccaagaactggctacccgggcccatgtaccggcagcaacgcgtttccacgacactgtcgcaaaataacaacagcaactttgcctggactggaggcactaaatatcacctgaacggcagagactcactggtgtacccaggtgtagccatggcaaccaacaaggacgacgaggaccgcttttttccatctagcggagtactcatgtttggtaaacaaggagctggaaaagacaacgtggattacagcagcgtcatgctaaccagcgaagaggaaatcaagaccaccaatcccgtggctacagaacagtacggggtagtagccgacaacttacaacaacagaatacggctcctattgttggagcggtaaacagccagggagccttacccggcatggtctggcagaaccgggacgtgtacctgcagggtcccatctgggccaagattccccacacggacggcaactttcacccgtctcccctgatgggcggatttggactcaaacatccacctcctcagatcctgatcaaaaacaccccggtacctgccgatcctccaactgccttcaatcaagccaaactcaactccttcatcacgcagtacagcaccggccaggtcagcgtggaaatcgagtgggagctgcagaaggagaacagcaagcgctggaacccagagattcagtatacctccaactactacaaatctacaaatgtggactttgctgtcaatactgagggtgtttattctgagcctcgccccattggcactcgttacctcacccgtaatctgtaa

SEQ ID NO: 318 - DNA, 2214 bp, Adeno-Associated Virus
  source 1..2214: mol_type = other DNA; note = BMN_0218
atggctgccgatggttatcttccagattggctcgaggacaacctctctgagggcattcgcgagtggtgggcgctgaaacctggagccccgaaacccaaagccaaccagcaaaagcaggacgacggccggggtctggtgcttcctggctacaagtacctcggacccttcaacggactcgacaagggggggcccgtcaacgcggcggacgcagcggccctcgagcacgacaaggcctacgaccagcagctgcaggcgggtgacaatccgtacctgcggtataaccacgccgacgccgagtttcgggagcgtctgcaagaagatacgtcttttgggggcaacctcgggcgagcagtcttccaggccaagaagcgggttctcgaacctctcggtctggtggaggaaggcgctaagacggctcctggaaagaagagaccagtagagcagtcaccccaagagccagactcatcctcgggcatcggcaagaaaggccagcagcccgctaaaaagagactcaactttggtcagactggcgactcagagtcagtccccgaccctcaacctctcggagaacctccagcagcgccctctagtttgggacttaatacaatggctgcaggcggtggcgcaccaatggcagacaataacgaaggcgccgacggagtgggtagttcctcgggaaattggcattgcgattccacatggctgggcgacagagtcatcaccaccagcacccggacctgggccctacccacctacaacaaccacctctacaagcaaatctccaacggcacctcgggaggaagtacaaatgacagcacctacttcggctacagcaccccctgggggtattttgacttcaacagatcccactgccacttttcaccacgtgactggcagcgactcatcaacaacaactgggggttccggcccaagaagctcagcttcaagctcttcaacatccaggtcaaggaggtcacgcagaatgaaggcaccaagaccatcgccaataacctcaccagcaccatccaggtgtttacggactcggaataccagctgccgtacgtcctcggctccgcgcaccagggctgcctccctccgttcccggcggacgtcttcatgatcccgcagtacggctacctgactctgaacaatggcggccaggccgtgggccgttcctccttctactgcctggaatattttccatcacagatgctgagaacaggcaacaacttttcgttcagctacatcttcgaggacgtgcctttccacagcagctacgcgcacagccagagcctggaccgtctgatgaatcctctcatcgatcagtacctgtactacctgtcaagaacccaatccacgggaggcacggctggaactcagcagctgttgttttctcaggcgggtcccaataacatgtcggctcaggccaagaactggctacccgggcccatgtaccggcagcaacgcgtttccacgacactgtcgcaaaataacaacagcaactttgcctggactggaggcactaaataccacctgaacggcagagactcactggtgaacccaggtgtagccatggcaaccaacaaggacgacgaggaccgcttttttccatctagcggagtactcatgtttggtaaacaaggagctggaaaagacaacgtggattacagcagcgtcatgctaaccagcgaagaggaaatcaagaccaccaatcccgtggctacagaacagtacggggtagtagccgacaacttacaacaacagaatacggctcctattgttggagcggtaaacagccagggagccttacccggcatggtctggcagaaccgggacgtgtacctgcagggtcccatctgggccaagattccccacacggacggcaactttcacccgtctcccctgatgggcggatttggactcaaacatccacctcctcagatcctgatcaaaaacaccccggtacctgccgatcctccaactgccttcaatcaagccaaactcaactccttcatcacgcagtacagcaccggccaggtcagcgtggaaatcgagtgggagctgctgaaggagagcagcaagcgctggaacccagagattcagtatacctccaactactacaaatctacaaatgtggactttgctgtcaatactgagggtgtttattctgagcctcgccccattggcactcgttacctcacccgtaatctgtaa

SEQ ID NO: 319 - DNA, 2193 bp, Adeno-Associated Virus
  source 1..2193: mol_type = other DNA; note = BMN_0250
atggctgccgatggttatcttccagattggctcgaggacaacctctctgagggcattcgcgagtggtgggcgctgaaacctggagccccgcagcccaaggcgaaccagcaaaagcaggacgacggccggggtctggtgcttcctggctacaagtacctcggacccttcaacggactcgacaagggggagcccgtcaacgaggcggacgccgcggccctcgagcacgacaaggcctacgaccagcagctcaaagcgggtgacaatccgtacctgcggtataaccacgccgacgccgagtttcaggagcgtcttcaagaagatacgtctttcgggggcaacctcgggcgggcagtcctccaggccaagaagcgggttctcgaacctctgggcctggtcgaggaggcagctaagacggctcctggaaaaaagagaccggtagactctccagactctacctcgggcatcggcaagaaaggccagcagcccgccagaaagagactcaattttgggcagactggcgacgcagagtcagtgcccgaccctcaacccatcggagaacctccagcagcgccctctggtctgggatctggtacaatggctgcaggtggtggcgcaccaatggcagacaataacgagggtgccgacggagtgggtaatgcctcaggaaattggcattgcgattccacatggctgggcaacagagtcattaccaccagcacccgcacctgggccctgcccacctacaacaaccacctctacaagcaaatctccagcagcagctcaggagccaccaatgacaaccactacttcggctacagcaccccctgggggtattttgacttcaacagattccactgccacttctccccacgtgactggcagcgactcatcaacaacaactggggattcaggcccaagagactccgattcaagctcttcaacatccaagtcaaggaggtcacgacgaatgacggcgttacgaccatcgctaataaccttaccagcacggttcaggtcttctcggactcggaataccagctcccgtacgtgctcggctcggcgcaccagggctgcctgcctccgttcccggcggacgtcttcatgattcctcaatacggctacctgactctgaacaatggcagtcagtctgtaggccgctcctccttctactgcctggagtactttccgtctcagatgctgagaacgggtaacaactttgaattcagctacgagtttgaggacgtgcccttccacagcagctacgcgcacagccagagcctggaccggctgatgaaccctctcatcgaccagtatctgtactacttggcccggactcagagcagcaccggaacctccacgcgggaactgcaatttcatcaggctggaccagctactatggcagaacagtctaaaaactggttacctggtccctgcttcagacaacagcgcatttcgaaaacaacagataataacaacaacagcaactttgcttggactggtgctaccaaatatcacctaaacggaagaagttcattgactaacccaggagtacccatggctactcacaaggatgatgaaagtgtcttcttcccaattaatggagttctggtgtttggaaagactggagcttccaataaaaccacattggaaaacgtgctaatgacagatgaagaagaaattaaagctacaaatccagtggctacagaagaatatggtgtggtttctagcaacattcagtctcaaaatagcaacccaactacacagactgtcaacaaccagggggccttacctggcatggtgtggcagaaccgggacgtgtacctgcagggtccgatttgggccaagattcctcacacggacggcaactttcatccttcgccgctgatgggaggctttggactgaaacatccgcctcctcagatcctgatcaaaaacacgccggttcccgcgaatcctccagagacttttacaccagccaagtttgcctcgttcatcacgcagtacagcaccggacaggtcagcgtggaaattgaatgggagctgcagaaggagaacagcaagcgctggaacccagagatccagtatacttccaactacgacaagcagactggtgtgggctttgctgtggacactcagggtgtttattcagagcctcgccccattggcactcgttacctcacccgtaatctgtaa

SEQ ID NO: 320 - DNA, 2193 bp, Adeno-Associated Virus
  source 1..2193: mol_type = other DNA; note = BMN_0251
atggctgccgatggttatcttccagattggctcgaggacaacctctctgagggcattcgcgagtggtgggcgctgaaacctggagccccgcagcccaaggcgaaccagcaaaagcaggacgacggccggggtctggtgcttcctggctacaagtacctcggacccttcaacggactcgacaagggggagcccgtcaacgaggcggacgccgcggccctcgagcacgacaaggcctacgaccagcagctcaaagcgggtgacaatccgtacctgcggtataaccacgccgacgccgagtttcaggagcgtcttcaagaagatacgtctttcgggggcaacctcgggcgagcagtcttccaggccaagaagcgggttcttgaacctctgggcctggtcgaggaggcagctaagacggctcctggaaaaaagagaccggtagactctccagactctacctcgggcatcggcaagaaaggccagcagcccgccagaaagagactcaattttgggcagactggcgacgcagagtcagtgcccgaccctcaacccatcggagaacctccagcagcgccctctggtctgggatctggtacaatggctgcaggcggtggcgcaccaatggcagacaataacgagggtgccgacggagtgggtaatgcctcaggaaattggcattgcgattccacatggctgggcaacagagtcattaccaccagcacccgcacctgggccctgcccacctacaacaaccacctctacaagcaaatctccagcagcagctcaggagccaccaatgacaaccactacttcggctacagcaccccctgggggtattttgacttcaacagattccactgccacttctccccacgtgactggcagcgactcatcaacaacaactggggattcaggcccaagagactccgattcaagctcttcaacatccaagtcaaggaggtcacgacgaatgacggcgttacgaccatcgctaataaccttaccagcacggttcaggtcttctcggactcggaataccagctcccgtacgtgctcggctcggcgcaccagggctgcctgcctccgttcccggcggacgtcttcatgattcctcaatacggctacctgactctgaacaatggcagtcagtctgtaggccgctcctccttctactgcctggagtactttccgtctcagatgctgagaacgggtaacaactttgaattcagctacgagtttgaggacgtgcccttccacagcagctacgcgcacagccagagcctggaccggctgatgaaccctctcatcgaccagtatctgtactacttggcccggactcagagcagcaccggaacctccacacgggaactgcaatttcatcaggctggaccagctactatggcagaacagtctaaaaactggttacctggtccctgcttcagacaacagcgcatttcgaaaacaacagataataacaacaacagcaactttgcttggactggtgctaccaaatatcacctaaacggaagaaattcattgactaacccaggagtacccatggctactcacaaggatgacgaaagtgtcttcttcccaattaatggagttctggtgtttggaaagactggagcttccaataaaaccacattggaaaacgtgctaatgacagatgaagaagaaattaaagctacaaatccagtggctacagaagaatatggtgtggtttctagcaacattcagtctcaaaatagcaacccaactacacagactgtcaacaaccagggggccttacctggcatggtgtggcagaaccgggacgtgtacctgcagggtccgatttgggccaagattcctcacacggacggcaactttcatccttcgccgctgatgggaggctttggactgaaacatccgcctcctcagatcctgatcaaaaacacgccggttcccgcgaatcctccagagacctttacaccagccaagtttgcctcgttcatcacgcagtacagcaccggacaggtcagcgtggaaattgaatgggagctgcagaaggagaacagcaagcgctggaacccagagatccagtatacttccaactacgacaagcagactggtgtggactttgctgtggacactcagggtgtttattcagagcctcgccccattggcactcgttacctcacccgtaatctgtaa

SEQ ID NO: 321 - DNA, 2193 bp, Adeno-Associated Virus
  source 1..2193: mol_type = other DNA; note = BMN_0253
atggctgccgatggttatcttccagattggctcgaggacaacctctctgagggcattcgcgagtggtgggcgctgaaacctggagccccgcagcccaaggcgaaccagcaaaagcaggacgacggccggggtctggtgcttcctggctacaagtacctcggacccttcaacggactcgacaagggggagcccgtcaacgaggcggacgccgcggccctcgagcacgacaaggcctacgaccagcagctcaaagcgggtgacaatccgtacctgcggtataaccacgccgacgccgagtttcaagagcgtcttcaagaagatacgtctttcgggggcaatctcgggcgagcagtcttccaggccaagaagcgggttctcgaacctctgggcctggtcgaggaggcagctaagacggctcctggaaaaaagagaccggtagactctccagactctacctcgggcatcggcaagaaaggccagcagcccgccagaaagagactcaattttgggcagactggcgacgcagagtcagtgcccgacccacaacccatcggagaacctccagcagcgccctctggtctgggatctggtacaatggctgcaggtggtggcgcaccaatggcagacaataacgagggtgccgacggagtgggtaatgccccaggaaattggcattgcgattccacatggctgggcaacagagtcattaccaccagcacccgcacctgggccctgcccacctacaacaaccacctctacaagcaaatctccagcagcagctcaggagccaccaatgacaaccactacttcggctacagcaccccctgggggtattttgacttcaacagattccactgccacttctccccacgtgactggccgcgactcatcaacaacaactggggattccggcccaagagactccgattcaagctcttcaacatccaagtcaaggaggtcacgacgaatgacggcgttacgaccatcgctaataaccttaccagcacggttcaggtcttctcggactcggaataccagctcccgtacgtgctcggctcggcgcaccagggctgcctgcctccgttcccggcggacgtcttcatgattcctcaatacggctacctgactctgaacaatggcagtcagtctgtaggccgctcctccttctactgcctggagtactttccgtctcagatgctgagaacgggtaacaactttgaattcagctacgagtttgaggacgtgcccttccacagcagctacgcgcacagccagagcctggaccggctgatgaaccctctcatcgaccagtatccgtactacttggcccggactcagagcagcaccggaacctccacacgggaactgcaatttcatcaggctggaccagctactatggcagaacagtctaaaaactggttacctggtccctgcttcagacaacagcgcatttcgaaaacaacagataataacaacaacagcaactttgcttggactggtgctaccaaatatcacctaaacggaagaaattcattgactaacccaggagtacccatggctactcacaaggatgatgaaagtgtcttcttcccaattaatggagttctggtgtttggaaagactggagcttccaataaaaccacattggaaaacgtgctaatgacagatgaagaagaaattaaagctacaaatccagtggctacagaagaatatggtgtggtttctagcaacattcagtctcaaaatagcaacccagctacacagactgtcaacaaccagggggccttacctggcatggtgtggcagaaccgggacgtgtacctgcagggtccgatttgggccaagattcctcacacggacggcaactttcatccttcgccgctgatgggaggctttggactgaaacatccgcctcctcagatcctgatcaaaaacacgccggttcccgcgaatcctccagagacttttacaccagccaagtttgcctcgttcatcacgcagtacagcaccggacaggtcagcgtggaaattgaatgggagctgcagaaggagaacagcaagcgctggaacccagagatccagtatacttccaactacgacaagcagactggtgtggactttgctgtggacactcagggtgtttattcagagcctcgccccattggcactcgttacctcacccgtaatctgtaa

SEQ ID NO: 322 - DNA, 2193 bp, Adeno-Associated Virus
  source 1..2193: mol_type = other DNA; note = BMN_0254
atggctgccgatggttatcttccggattggctcgaggacaacctctctgagggcattcgcgagtggtgggcgctgaaacctggagccccgcagcccaaggcgaaccagcaaaagcaggacgacggccggggtctgatgcttcctggctacaagtacctcggacccttcaacggactcgacaagggggagcccgtcaacgaggcggacgccgcggccctcgagcacgacaaggcctacgaccagcagctcaaagcgggtgacaatccgtacctgcggtataaccacgccgacgccgagtttcaagagcgtcttcaagaagatacgtctttcgggggcaatctcgggcgagcagtcttccaggccaagaagcgggttctcgaacctctgggcctggtcgaggaggcagctaagacggctcctggaaaaaagagaccggtagactctccagactctacctcgggcatcggcaagaaaggccagcagcccgccagaaagagactcaattttgggcagactggcgacgcagagtcggtgcccgacccacaacccatcggagaacctccagcagcgccctctggtctgggatctggtacaatggctgcaggtggtggcgcaccaatggcagacaataacgagggtgccgacggagtgggtaatgcctcaggaagttggcattgcgattccacatggctgggcaacagagtcattaccaccagcacccgcacctgggccctgcccacctacaacaaccacctctacaagcaaatctccagcagcagctcaggagccaccaatgacaaccactacttcggctacagcaccccctgggggtattttgacttcaacagattccactgccacttctccccacgtgactggcagcgactcatcaacaacaactggggattccggcccaagagactccgattcaagctcttcaacatccaagtcaaggaggtcacgacgaatgacggcgttacgaccatcgctaataaccttaccagcacggttcaggtcttctcggactcggaataccagctcccgtacgtgctcggctcggcgcaccagggctgcctgcctccgttcccggcggacgtcttcatgattcctcaatacggctacctgactctgaacaatggccgtcagtctgtaggccgctcctccttctactgcctggagtactttccgtctcagatgctgagaacgggtaacaactttgaattcagctacgagtttgaggacgtgcccttccacagcagctacgcgcacagccagagcctggaccggctgatgaaccctctcatcgaccagtatccgtactacttggcccggactcagagcagcaccggaacctccacacgggaactgcaatttcatcaggctggaccagctactatggcagaacagtctaaaaactggttacctggtccctgcttcagacaacagcgcatttcgaaaacaacagataataacaacaacagcaactttgcttggactggtgctaccaaatatcacctaaacggaagaaattcattgactaacccaggagtacccatggctactcacaaggatgatgaaagtgtcttcttcccaattaatggagttctggtgtttggaaagactggagcttccaataaaaccacattggaaaacgtgccaatgacagatgaagaagaaattaaagctacaaatccagtggctacagaagaatatggtgtggtttctagcaacattcagtctcaaaatagcaacccaactacacagactgtcaacaaccagggggccttacctggcatggtgtggcagaaccgggacgtgtacctgcagggtccgatttgggccaagattcctcacacggacggcaactttcatccttcgccgctgatgggaggctttggactgaaacatccgcctcctcagatcctgatcaaaaacacgccggttcccgcgaatcctccagagacttttacaccagccaagtttgcctcgttcatcacgcagtacagcaccggacaggtcagcgtggaaattgaatgggagctgcagaaggagaacaacaagcgctggaacccagagatccagtatacttccaactacgacaagcagactggtgtggactttgctgtggacactcagggtgtttattcagagcctcgccccattggcactcgttacctcacccgtaatctgtaa

SEQ ID NO: 323 - DNA, 2193 bp, Adeno-Associated Virus
  source 1..2193: mol_type = other DNA; note = BMN_0255
atggctgccgatggttatcttccagattggctcgaggacaacctctctgagggcattcgcgagtggtgggcgctgaaacctggagccccgcagcccaaggcgaaccagcaaaagcaggacgacggccggggtctggtgcttcctggctacaagtacctcggacccttcagcggactcgacaagggggagcccgtcaacgaggcggacgccgcggccctcgagcacgacaaggcctacgaccagcagctcaaagcgggtgacaatccgtacctgcggtataaccacgccgacgccgagtttcaagagcgtcttcaagaagatacgtctttcgggggcaatctcgggcgagcagtcttccaggccaagaagcgggttctcgaacctctgggcctggtcgaggaggcagctaagacggctcctggaaaaaagagaccggtagactctccagactctacctcgggcatcggcaagaaaggccagcagcccgccagaaagagactcaattttgggcagactggcgacgcagagtcagtgcccgacccacaacccatcggagaacctccagcagcgccctctggtctgggatctggtacaatggctgcaggtggtggcgcaccaatggcagacaataacgagggtgccgacggagtgggtaatgcctcaggaaattggcattgcgattccacatggctgggcaacagagtcattaccaccagcacccgcacctgggccctgcccacctacaacgaccacctctacaagcaaatctccagcagcagctcaggagccaccaatgacaaccactacttcggctacagcaccccctgggggtattttgacttcaacagattccactgccacttctccccacgtgactggcagcgactcatcaacaacaactggggattccggcccaagagactccgattcaagctcttcaacatccaagtcaaggaggtcacgacgaatgacggcgttacgaccatcgctaataaccttaccagcacggttcaggtcttctcggactcggaataccagctcccgtacgtgctcggctcggcgcaccagggctgcctgcctccgttcccggcggacgtcttcatgattcctcaatacggctacctgactctgaacaatggcagtcagtctgtaggccgctcctccttctactgcctggagtactttccgtctcagatgctgagaacgggtaacaactttgaattcagctacgagtttgaggacgtgcccttccacagcagctacgcgcacagccagagcctggaccggctgatgaaccctctcatcgaccagtatctgtactacttggcccggactcagagcagcaccggaacctccacacgggaactgcaatttcatcaggctggaccagctactatggcagaacagtctaaaaactggttacctggtccctgcttcagacaacagcgcatttcgaaaacaacagataataacaacaacagcaactttgcttggactggtgctaccaaatatcacctaaacggaagaaattcattgactaacccaggagtacccatggctactcacaaggatgatgaaagtgtcttcttcccaattaatggagttctggtgtttggaaagactggagcttccaataaaaccacattggaaaacgtgctaatgacagatgaagaagaaattaaagctacaaatccagtggctacagaagaatatggtgtggtttctagcaacattcagtctcaaaatagcaacccaactacacagactgtcaacaaccagggggccttacctggcatggtgtggcggaaccgggacgtgtacctgcagggtccgatttgggccaagattcctcacacggacggcaactttcatccttcgccgctgatgggaggctttggactgaaacatccgcctcctcagatcctgatcaaaaacacgccggttcccgcgaatcctccagagacttttacaccagccaagtttgcctcgttcatcacgcagtacagcaccggacaggtcagcgtggaaattgaatgggagctgcagaaggagaacagcaagcgctggaacccagagatccagtatacttccaactacgacaagcagactggtgtggactttgctgtggacactcagggtgtttattcagagcctcgccccattggcactcgttacctcacccgtaatctgtaa

SEQ ID NO: 324 - DNA, 2193 bp, Adeno-Associated Virus
  source 1..2193: mol_type = other DNA; note = BMN_0256
atggctgccgatggttatcttccagattggctcgaggacaacctctctgagggcattcgcgagtggtgggcgctgaaacctggagccccgcagcccaaggcgaaccagcaaaagcaggacgacggccggggtctggtgcttcctggctacaagtacctcggacccttcaacggactcgacaagggggagcccgtcaacgaggcggacgccgcggccctcgagcacgacaaggcctacgaccagcagctcaaagcgggtgacaatccgtacctgcggtataaccacgccgacgccgagtttcaagagcgtcttcaagaagatacgtctttcgggggcaatctcgggcgagcagtcttccaggccaagaagcgggttctcgaacctctgggcctggtcgaggaggcagctaagacggctcctggaaaaaagagaccggtagactctccagactctacctcgggcatcggcaagaaaggccagcagcccgccagaaagagactcaattttgggcagactggcgacgcagagtcagtgcccgacccacaacccatcggagaacctccagcagcgccctctggtctgggatctggtacaatggctgcaggtggtggcgcaccaatggcagacaataacgagggtgccgacggagtgggtaatgcctcaggaaattggcattgcgattccacatggctgggcaacagagtcattaccaccagcacccgcacctgggccctgcccacctacaacaaccacctctacaagcaaatctccagcagcagctcaggagccaccaatgacaaccactacttcggctacagcaccccctgggggtattttgacttcaacagattccactgccacttctccccacgtgactggcagcgactcatcaacaacaactggggattccggcccaagagactccgattcaagctcttcaacatccaagtcaaggaggtcacgacgaatgacggcgttacgaccatcgctaataaccttaccagcacggttcaggtcttctcggactcggaataccagctcccgtacgtgctcggctcggcgcaccagggctgcctgcctccgttcccggcggacgtcttcatgattcctcaatacggctacctgactctgaacaatggcagtcagtctgtaggccgctcctccttctactgcctggagtactttccgtctcagatgctgagaacgggtaacaactttgaattcagctacgagtttgaggacgtgcccttccacagcagctacgcgcacagccagagcctggaccggctgatgaaccctctcatcgaccagtatctgtactacatggcccggactcagagcagcaccggaacctccacacgggaaccgcaatttcatcaggctggaccagctactatggcagaacagtctaaaaactggttacctggtccctgcttcagacaacagcgcatttcgaaaacaacagataataacaacaacagcaactttgcttggactggtgctaccaaatatcacctaaacggaagaaattcattgactaacccaggagtacccatggctactcacaaggatgatgaaagtgtcttcttcccaattaatggagttctggtgtttggaaagactggagcttccaataaaaccacattggaaaacgtgctaatgacagatgaagaagaaattaaggctacaaatccagtggctacagaagaatatggtgtggtttctagcaacattcagtctcaaaatagcaacccaactacacagactgtcaacaaccagggggccttacctggcatggtgtggcagaaccgggacgtgtacctgcagggtccgatttgggccaagattcctcacacggacggcgactttcatccttcgccgctgatgggaggctttggactgaaacatccgcctcctcagatcctgatcaaaaacacgccggttcccgcgaatcccccagagacttttacaccagccaagtttgcctcgttcatcacgcagtacagcaccggacaggtcagcgtggaaattgaatgggagctgcagaaggagaacagcaagcgctggaacccagagatccagtatacttccaactacgacaagcagactggtgtggactttgctgtggacactcagggtgtttattcagagcctcgccccattggcactcgttacctcacccgtaatctgtaa

SEQ ID NO: 325 - DNA, 2193 bp, Adeno-Associated Virus
  source 1..2193: mol_type = other DNA; note = BMN_0257
atggctgccgatggttatcttccagattggctcgaggacaacctctctgagggcattcgcgagtggtgggcgctgaaacctggagccccgcagcccaaggcgaaccagcaaaagcaggacgacggccggggtctggtgcttcctggctacaagtacctcggacccttcaacggactcgacaagggggagcccgtcaacgaggcggacgccgcggccctcgagcacgacaaggcctacgaccagcagctcaaagcgggtgacaatccgtacctgcggtataaccacgccgacgccgagtttcaggagcgtcttcaagaagatacgtctttcgggggcaacctcgggcgagcagtcttccaggccaagaagcgggttctcgaacctctgggcctggtcgaggaggcagctaagacggctcctggaaaaaagagaccggtagactctccagactctacctcgggcatcggcaagaaaggccagcagcccgccagaaagagactcaattttgggcagactggcgacgcagagtcagtgcccgaccctcaacccatcggagaacctccagcagcgccctctggtctgggatctggtacaatggctgcaggtggtggcgcaccaatggcagacaataacgagggtgccgacggagtgggtaatgcctcaggaaattggcattgcgattccacatggctgggcaacagagtcattaccaccagcacccgcacctgggccctgcccacctacaacaaccacctctacaagcaaatctccagcggcagctcaggagccaccaatgacaaccactacttcggctacagcaccccctgggggtattttgacttcaacagattccactgccacttctccccacgtgactggcagcgactcatcaacaacaactggggattccggcccaagagactccgattcaagctcttcaacatccaagtcaaggaggtcacgacgaatgacggcgttacgaccatcgctaataaccttaccagcacggttcaggtcttctcggactcggaataccagctcccgtacgtgctcggctcggcgcaccagggctgcctgcctccgttcccggcggacgtcttcatgattcctcaatacggctacctgactctgaacaatggcagtcagtctgtaggccgctcctccttctactgcctggagtactttccgtctcaggtgctgagaacgggtaacaactttgaattcagctacgagtttgaggacgtgcccttccacagcagctacgcgcacagccagagcctggaccggctgatgaaccctctcatcgaccagtatctgtactacttggcccggactcagagcagcaccggaacctccacacgggaactgcaatttcatcaggctggaccagctactatggcagaacagtctaaaaactggttacctggtccctgcttcagacaacagcgcatttcgaaaacatcagataataacaacaacagcaactttgcttggactggtgctaccaaatatcacctaaacggaagaaattcattgactaacccaggagtacccatggctactcacaaggatgatgaaagtgtcttcttcccaattaatggagttctggtgtttggaaagactggagcttccaataaaaccacattggaaaacgtgctaatgacagatgaagaagaaattaaagctacaaatccagtggctacagaagaatatggtgtggtttctagcaacattcagtctcaaaatagcaacccaactacacagactgtcaacaaccagggggccttacctggcatggtgtggcagaaccgggacgtgtacctgcagggtccgatttgggccaagattcctcacacggacggcaactttcatccttcgccgctgatgggaggctttggactgaaacatccgcctcctcagatcctgatcaaaaacacgccggttcccgcgaatcctccagagacttttacaccagccaagtttgcctcgttcatcacgcagtacagcaccggacaggtcagcgtggaaattgaatgggagctgcagaaggagaacagcaagcgctggaacccagagatccagtatacctccaactacgacaagcagactggtgtggactttgctgtggacactcagggtgtttattcagagcctcgccccattggcactcgttacctcacccgtaatctgtaa

SEQ ID NO: 326 - DNA, 2193 bp, Adeno-Associated Virus
  source 1..2193: mol_type = other DNA; note = BMN_0258
atggctgccgatggttatcttccagattggctcgaggacaacctctctgagggcattcgcgagtggtgggcgctgaaacctggagccccgcagcccaaggcgaaccagcaaaagcaggacgacggccggggtctggtgcttcctggctacaggtacctcggacccttcaacggactcgacaagggggagcccgtcaacgaggcggacgccgcggccctcgagcacgacaaggcctacgaccagcagctcaaagcgggtgacaatccgtacctgcggtataaccacgccgacgccgagtttcaggagcgtcttcaagaagatacgtctttcgggggcaacctcgggcgagcagtcttccaggccaagaagcggattctcgaacctctgggcctggtcgaggaggcagctaagacggctcctggaaaagagagaccggtagactctccagactctacctcgggcatcggcaagaaaggccagcagcccgccagaaagagactcaattttgggcagactggcgacgcagagtcagtgcccgaccctcaacccatcggagaacctccagcagcgccctctggtctgggatctggtacaatggctgcaggtggtggcgcaccaatggcagacaataacgagggtgccgacggagtgggtaatgcctcaggaaattggcattgcgattccacatggctgggcaacagagtcattaccaccagcacccgcacctgggccctgcccacctacgacaaccacctctacaagcaaatctccagcagcagctcaggagccaccaatgacaaccactacttcggctacagcaccccctgggggtattttgacttcaacagattccactgccacttctccccacgtgactggcagcgactcatcaacaacaactggggattccggcccaagagactccgattcaagctcttcaacatccaagtcaaggaggtcacgacgaatgacggcgttacgaccatcgctaataaccttaccagcacggttcaggtcttctcggactcggaataccagctcccgtacgtgctcggctcggcgcaccagggctgcctgcctccgttcccggcggacgtcttcatgattcctcaatacggctacctgactctgaacaatggcagtcagtctgtaggccgctcctccttctactgcctggagtactttccgtctcagatgctgagaacgggtaacaactttgaattcagctacgagtttgaggacgtgcccttccacagcagctacgcgcacagccagagcctggaccggctgatgaaccctctcatcgaccagtatctgtactacttggcccggactcagagcagcaccggaacctccacacgggaactgcaatttcatcaggctggaccagctactatggcagaacagtctaaaaactggttacctggtccctgcttcagacaacagcgcatttcgaaaacaacagataataacaacaacagcaactttgcttggactggtgctaccaaatatcacctaaacggaagaaattcattgactaacccaggagtacccatggctactcacaaggatgatgaaagtgtcttcttcccaattaatggagttctggtgcttggaaagactggagcttccaataaaaccacattggaaaacgtgctaatgacagatgaagaagaaattaaagctacaaatccagtggctacagaagaatatggtgtggtttctagcaacattcagtctcaaaatagcaacccaactacacagactgtcaacaaccagggggccttacctggcatggtgtggcagaaccgggacgtgtacctgcagggtccgatttgggccaagattcctcacacggacggcaactttcatccttcgccgctgatgggaggctttggactgaaacatccgcctcctcagatcctgatcaaaaacacgccggttcccgcgaatcctccagagacttttacaccagccaagtttgcctcgttcatcacgcagtacagcaccggacaggtcagcgtggaaattgaatgggagctgcagaaggagaacagcaagcgctggaacccagagatccagtatacttccaactacgacaagcagactggtgtggactttgctgtggacactcagggtgtttattcagagcctcgccccattggcactcgttacctcacccgtaatctgtaa

SEQ ID NO: 327 - DNA, 2193 bp, Adeno-Associated Virus
  source 1..2193: mol_type = other DNA; note = BMN_0260
atggctgccgatggttatcttccagattggctcgaggacaacctctctgagggcattcgcgagtggtgggcgctgaaacctggagccccgcggcccaaggcgaaccagcaaaagcaggacgacggccggggtctggtgcttcctggctacaagtacctcggacccttcaacggactcgacaagggggagcccgtcaacgaggcggacgccgcggccctcgagcacgacaaggcctacgaccagcagctcaaagcgggtgacaatccgtacctgcggtataaccacgccgacgccgagtttcaggagcgtcttcaagaagatacgtctttcgggggcaacctcgggcgagcagtcttccaggccaagaagcgggttctcgaacctctgggcctggtcgaggaggcagctaagacggctcctggaaaaaagagaccggtagactctccagactctacctcgggcatcggcaagaaaggccagcagcccgccagaaagagactcaattttgggcagactggcgacgcagagtcagtgcccgaccctcaacccatcggagaacctccagcagcgccctctggtctgggatctggtacaatggctgcaggtggtggcgcaccaatggcagacaataacgagggtgccgacggagtgggtaatgcctcaggaaattggcattgcgactccacatggctgggcaacagagtcattaccaccagcacccgcacctgggccctgcccacctacaacaaccacctctacaagcaaatctccagcagcagctcaggagccaccaatgacaaccactacttcggctacagcaccccctgggggtattttgacttcaacagattccactgccacttctccccacgtgactggcagcgactcatcaacaacaactggggattccggcccaagagactccgattcaagctcttcaacatccaagtcaaggaggtcacgacgaatgacggcgttacgaccatcgctaataaccttaccagcacggttcaggtcttctcggactcggaataccagctcccgtacgtgctcggctcggcgcaccagggctgcctgcctccgttcccggcggacgtcttcatgattcctcaatacggctacctgactctgaacaatggcagtcagtctgtaggccgctcctccttctaccgcctggagtactttccgtctcagatgctgaggacgggtaacaactttgaattcagctacgagtttgaggacgtgcccttccacagcagctacgcgcacagccagagcctggaccggctgatgaaccctctcatcgaccagtatctgtactacttggcccggactcagagcagcaccggaacctccacacgggaactgcaatttcatcaggctggaccagctactatggcagaacagtctaaaaactggttacctggtccctgcttcagacaacagcgcatttcgaaaacaacagataataacaacaacagcaactttgcttggactggtgctaccaaatatcacctaaacggaagaaattcattgactaacccaggagtacccatggctactcacagggatgatgaaagtgtcttcttcccaattaatggagttctggtgtttggaaagactggagcttccaataaaaccacattggaaaacgtgctaatgacagatgaagaagaaattaaagctacaaatccagtggctacagaagaatatggtgtggtttctagcaacattcagtctcaaaatagcaacccaactacacagactgtcaacaaccagggggccttacctggcatggtgtggcagaaccgggacgtgtacctgcagggtccgatttgggccaagattcctcacacggacggcaactttcatccttcgccgctgatgggaggctttggactgaaacatccgcctcctcagatcctgatcaaaaacacgccggttcccgcgaatcctccagagacttttacaccagccaagtttgcctcgttcatcacgcagtacagcaccggacaggtcagcgtggaaattgaatgggagctgcagaaggagaacagcaagcgctggaacccagagatccagtatacttccaactacgacaagcagactggtgtggactttgctgtggacactcagggtgtttattcagagcctcgccccattggcactcgttacctcacccgtaatctgtaa

SEQ ID NO: 328 - DNA, 2220 bp, Adeno-Associated Virus
  source 1..2220: mol_type = other DNA; note = BMN_0261
atggctgctgacggttatcttccagattggctcgaggacaacctctctgaaggcatccgtgagtggtgggcgctgaaacctggagccccacaacccaaagcgaatcaacaacatcagggcaacagcaggggtcttgtgcttcctgggtacaagtacctcggactcttcaacggactcgacaagggagagccggtcaacgaggcagacgccgcggccctcgagcacgacaaggcctacgacaagcagctcgagcagggggacgacccgtacctcaagtacaaccacgcggacgccgagtttcaggagcgtcttcaagaagatacgtcttttgggggcaacctcgggcgagcagtcttccaggccaaaaagaggattctcgagcctctgggtctggttgaggaagcggctaagacggctcctggaaagaagcgacctctagagaaaacccccaatcagcccacggacactcaggccgccgggcagactccagccaagaaaaggccacagggcgagcaatctggcgactccgctagaaggcagctcgactttggtccacaaccagcagcacccatcggacaaccccccgcagccccccctcctgtgggatctaatacaatggcttcaggtggtggcggaccaatggcagacgataaccaaggcgccgacggagtgggtaatgcctcgggaaattggcattgcgattccacatggctgggcgacagagtcatcaccaccagcacccgaacctgggtcctgcccacctacaacaaccacatctacaagcaaatctccagcgaatcgggagccaccaatgacaaccactacttcggctacagcaccccctgggggtattttgacttcaacagattccactgccacttttcaccacgtgactggcagcgactcatcaacaacaactggggattccgacccaagcgactcaacttcaagatcttcaacgtccaggtcaaagaagtcacgcagatcgagggcggctcgaccatcgccaataaccttaccagcacgattcaggtctttgcggactcggagtaccagcttccctacgtcctcgggtcggctcaccagggctgcctcccgccgttcccggccgatgtcttcatgattccccagtacggatacctgactctgaacaacggcagccaatcagtgggacgctcttccttttactgcctggagtatttcccatcccagatgctgagaactggaaataactttcaattcagctatacctttgaaagcgtgcctttccacagcagctacgcgcacagccagagcctggaccgcatcatgaaccccctggtggaccagtacctgtactacctggccagaactcagacgggtaccggaagcaccaccagcaacacgcggcagctgcagttttaccaggccgggccttccaacatggctgaccaatccaggaactggttgcctgggcccatgtaccggcagcagcgggtctccaagactctggaccaaaacagcaacaccaactttgcctggacggctgccagcaaatacaacctgaatggacgcaaatcattggctaatcctggcattgccatggcgactcacaaggatgacgaggagcgcttttttcctcagcacggggttctggtgtttggacagacaaatgctaccaacaagacaactttggacaatgttttagttactagtgaagaagaaattaaggcgaccaatccggtggccacggaggagtacgggactgtttctagcaacctacaagcaagtaacaccaaccccacaacggaaactgtcaacaaccagggcatacttcctggtatggtctggcaggaccgggacgtgtacctgcagggtcccatttgggccaaaattcctcacacggacggacactttcacccgtctcccctgatgggcggctttggtctgaagcacccgcctccccagattctcatcaaaaacaccccggtacctgcgaatcctccagagacttttaccacttccaagtttgccagctacatcacacagtacagcaccggacaggtcagcgtggaaattgaatgggagctgcagaaggaaaacagcaagagatggaacccagaaattcagtacacttccaactacgcgaaatccaacaatgtggagttctccgtggatgcagccggtgtttattctgaaccccgccctattggtactcgttacctcacccgtaatctgtaa

SEQ ID NO: 329 - DNA, 2220 bp, Adeno-Associated Virus
  source 1..2220: mol_type = other DNA; note = BMN_0262
atggctgctgacggttatcttccagattggctcgaggacaacctctctgaaggcatccgtgagtggtgggcgctgaaacctggagccccacaacccaaagcgaatcaacaacatcaggacaacagcaggggtcttgtgcttcctgggtacaagtacctcggacccttcaacggactcgacaagggagagccggtcaacgaggcagacgccgcggccctcgagcacgacaaggcctacgacaagcagctcgagcagggggacaacccgtacctcaagtacaaccacgcggacgccgagcttcaggagcgtcttcaagaagatacgtcttttgggggcaacctcgggcgagcagtcttccaggccaaaaagaggattctcgagcctctgggtctggttgaggaagcggctaagacggctcctggaaagaagcgacctctagagaaaacccccaatcagcccacggacactcaggccgccgggcagactccagccaagaaaaggccacagggcgagcaatctggcgactccgctagaaggcagctcgactttgatccacaaccagcagcacccatcggacaaccccccgcagccccccctcctgtgggatctaatacaatggcttcaggtggtggcggaccaatggcagacgataaccaaggcgccgacggagtgggtaatgcctcgggaaattggcatcgcgattccacatggctgggcgacagagtcatcaccaccagcacccgaacctgggtcctgcccacctacaacaaccacatctacaagcaaatctccagcgaatcgggagccaccaatgacaaccactacttcggctacagcaccccctgggggtattttgacttcaacagattccactgccacttttcaccacgtgactggcagcgactcatcaacaacaactggggattccgacccaagcgactcaacttcaagatcttcaacatccaggtcaaagaagtcacgcagatcgagggcggctcgaccatcgccaataaccttaccagcacgattcaggtctttgcggactcggagtaccagcttccttacgtcctcgggtcggctcaccagggctgcctcccgccgttcccggccgatgtcttcatgattccccagtacggatacctgactctgaacaacggcagccaatcagtgggacgctcttccttttactgcctggaatatttcccatcccagatgctgagaactggaaataactttcaattcagctatacctttgaaagcgtgcctttccacagcagctacgcgcacagccagagcctggaccgcatcatgaaccccctggtggaccagtacctgtactacctggccagaactcagacgggtaccggaagcaccaccagcaacacgcggcagctgcagttttaccaggccgggccttccaacatggctgaccaatccaggaactggttgcctgggcccatgtaccggcagcagcgggtctccaagactctggaccaaaacagcaacaccaactttgcctggacggctgccagcaaatacaacctgaatggacgcaaatcattggctaatcctggcattgccatggcgactcacaaggatgacgaggagcgcttttttcctcagcacggggttctggtgtttggacagacaaatgctaccaacaagacaactttggacaatgttttaattactagtgaagaagaaattaaggcgaccaatccggtggccacggaggagtacgggactgtttctagcaacctacaagcaagtaacaccaaccccacaacggaaactgtcaacagccagggcatacttcctggtatggtctggcaggaccgggacgtgtacctgcagggtcccatttgggccaaaattcctcacacggacggacactttcacccgtctcccctgatgggcggctttggtctgaagcacccgcctccccagattctcatcaaaaacaccccggtacctgcgaatcctccagagacttttaccacttccaagtttgccagctacatcacacagtacagcaccggacaggtcagcgtggaaattgaatgggagctgcagaaggaaaacggcaagagatggaacccagaaattcagtacacttccaactacgcgaaatccaacaatgtggagttctccgtggatgcagccggtgtttattctgaaccccgccctattggtactcgttacctcacccgtaatctgtaa

SEQ ID NO: 330 - DNA, 2220 bp, Adeno-Associated Virus
  source 1..2220: mol_type = other DNA; note = BMN_0263
atggctgctgacggttatcttccagattggctcgaggacaacctctctgaaggcatccgtgagtggtgggcgctgaaacctggagccccacaacccaaagcgaatcaacaacatcaggacaacagcaggggtcttgtgcttcctgggtacaagtacctcggacccttcaacggactcgacaagggagagccggtcaacgaggcagacgccgcggccctcgagcacgacaaggcctacgacaagcagctcgagcagggggacaacccgtacctcaagtacaaccacgcggacgccgagtttcaggagcgtcttcaagaagatacgtcttttgggggcaacctcgggcgagcagtcttccaggccaaaaagaggattctcgagcctctgggtctggttgaggaagcggctaagacggctcctggaaagaggcgacctctagagaaaacccccaatcagcccacggacactcaggccgccgggcagactccagccaagaaaaggccacagggcgagcaatctggcgactccgctagaaggcagctcgactttgatccacaaccagcagcacccatcggacaaccccccgcagccccctctcctgtgggatctaatacaatggcttcaggtggtggcggaccaatggcagacgataaccaaggcgccgacggagtgggtaatgcctcgggaaattggcattgcgattccacatggctgggcgacagagtcatcaccaccagcacccgaacctgggtcctgcccacctacaacaaccacatctacaagcaaatctccagcgaatcgggagccaccaatgacaaccactacttcggctacagcaccccctgggggtattttgacttcaacagattccactgccacttttcaccacgtgactggcagcgactcatcaacaacaactggggattccgacccaagcgactcaacttcaagatcttcaacatccaggtcaaagaagtcacgcagatcgagggcggctcgaccatcgccaataaccttaccagcacgattcaggtctttgcggactcggagtaccagcttccctacgtcctcgggtcggctcaccagggctgcctcccgccgttcccggccgatgtcttcatgattccccagtacggatacctgactctgaacaacggcagccaatcagtgggacgctcttccttttactgcctggaatatttcccatcccagatgctgagaactggaaataactttcaattcagctatacctttgaaagcgtgcctttccacagcagctacgcgcacagccagagcctggaccgcatcatgaaccccctggtggaccagtgcctgtactacctggccagaactcagacgggtaccggaagcaccaccagcaacacgcggcagctgcagttttaccaggccgggccttccaacatggctgaccaatccaggaactggttgcctgggcccatgtaccggcagcagcgggtctccaagactctggaccaaaacagcaacaccaactttgcctggacggctgccagcaaatacaacctgaatggacgcaaatcattggctaatcctggcattgccatggcgactcacaaggatgacgaggagcgcttttttcctcagcacggggttctggtgtttggacagacaaatgctaccaacaagacaactttggacaatgttttaattactagtgaagaagaaattaaggcgaccaatccggtggccacggaggagtacgggactgtttctagcaacctacaagcaagtaacaccaaccccacaacggaaactgtcaacaaccagggcatacttcctggtatggtctggcaggaccgggacgtgtacctgcagggtcccatttgggccaaaattcctcacacggacggacactttcacccgtctcccctgatgggcggctttggtctgaagcacccgcctccccagattctcatcaaaaacaccccggtacctgcgaatcctccagagacttttaccacttccaagtttgccagctacatcacacagtacagcaccggacaggtcagcgtggaaatcgaatgggagctgcagaaggaagacagcaagagatggaacccagaaattcagtacacttccaactacgcgaaatccaacaatgtggagttctccgtggatgcagccggtgtttattctgaaccccgccccattggtactcgttacctcacccgtaatctgtaa

SEQ ID NO: 331 - DNA, 2220 bp, Adeno-Associated Virus
  source 1..2220: mol_type = other DNA; note = BMN_0264
atggctgctgacggttatcttccagattggctcgaggacaacctctccgaaggcatccgtgagtggtgggcgctgaaacctggagccccacaacccaaagcgaatcaacaacatcaggacaacagcaggggtcttgtgcttcctgggtacaagtacctcggacccttcaacggactcgacaagggagagccggtcaacgaggcagacgccgcggccctcgagcacgacaaggcctacgacaagcagctcgagcagggggacaacccgtacctcaagtacaaccacgcggacgccgagtttcaggagcgtcttcaagaagatacgtcttttgggggcaacctcgggcgagcagtcttccaggccaaaaagaggattctcgagcctctgggtctggttgaggaagcggctaagacggctcctggaaagaagcgacctctagagaaaacccccaatcagcccacggacactcaggccgccgggcagactccagccaagaaaaggccacagggcgggcaatctggcgactccgctagaaggcagctcgactttgatccacaaccagcagcacccatcggacaaccccccgcagccccctctcctgtgggatctaatacaatggcttcaggtggtggcggaccaatggcagacgataaccaaggcgccgacggagtgggtaatgcctcgggaaattggcattgcgattccacatggctgggcgacagagtcatcaccaccagcacccgaacctgggtcctgcccacctacaacaaccacatctacaagcaaatctccagcgaatcgggagccaccaatgacaaccactacttcggctacagcaccccctgggggtattttgacttcaacagattccactgccacttttcaccacgtgactggcagcgactcatcaacaacaactggggattccgacccaagcgactcaacttcaagatcttcaacatccaggtcaaagaagtcacgcagatcgagggcggctcgaccatcgccaataaccttaccagcacgattcaggtctttgcggactcggagtacctgcttccctacgtcctcgggtcggctcaccagggctgcctcccgccgttcccggccgatgtcttcatgattccccagtacggatacctgactctgaacaacggcagccaatcagtgggacgctcttccttttactgcctggaatatttcccatcccagatgctgagaactggaaataactttcaattcagctatacctttgaaagcgtgcctttccacagcagctacgcgcacagccagagcctggaccgcatcatgaaccccctggtggaccagtacctgtactacctggccagaactcagacgggtaccggaagcaccaccagcaacacgcggcagctgcagttttaccaggccgggccttccaacatggctgaccaatccaggaactggttgcctgggcccatgtaccggcagcagcgggtctccaagactctggaccaaaacagcaacaccaactttgcctggacggctgccagcaaatacaacctgaatggacgcaaatcattggctaatcctggcattgccatggcgactcacaaggatgacgaggagcgcttttttcctcagcacggggttctggtgtttggacagacaaatgctaccaacaagacaactttggacaatgttttaattactagtgaagaagaaattaaggcgaccaatccggtggccacggaggagtatgggactgtttctagcaacctacaagcaagtaacaccaaccccacaacggaaactgtcaacaaccagggcatacttcctggtatggtctggcaggaccgggacgtgtacctgcagggtcccatttgggccaaaattcctcacacggacggacactttcacccgtctcccctgatgggcggctttggtctgaagcacccgcctccccagattctcatcaaaaacaccccggtacctgcgaatcctccagagacttttaccacttccaagtttgccagctacatcacacagtacagcaccggacaggtcagcgtggaaatcgaatgggagctgcagaaggaagacagcaagagatggaacccagaaattcagtacacttccaactacgcgaaatccaacaatgtggagttctccgtggatgcagccggtgtttattctgaaccccgccccattggtactcgttacctcacccgtaatctgtaa

SEQ ID NO: 332 - DNA, 2220 bp, Adeno-Associated Virus
  source 1..2220: mol_type = other DNA; note = BMN_0265
atggctgctgacggttatcttccagattggctcgaggacaacctctctgaaggcatccgtgagtggtgggcgctgaaacctggagccccacaacccaaagcgaatcaacaacatcaggacaacagcaggggtcttgtgcttcctgggtacaagtacctcggacccttcaacggactcgacaagggagagccggtcaacgaggcagacgccgcggccctcgagcacgacaaggcctacgacaagcagctcgagcagggggacaacccgtacctcaagtacaaccacgcagacgccgagtttcaggagcgtcttcaagaagatacgtcttttgggggcatcctcgggcgagcagtcttccaggccaaaaagaggattctcgagcctctgggtctggttgaggaagcggctaagacggctcctggaaagaagcgacctctagagaaaacccccaaccagcccacggacacccaggccgccgggcagactccagccaagaaaaggccacagggcgagcaatctggcgactccgctagaaggcagctcgactttgatccacaaccagcagctcccatcggacaaccccccgcagccccctctcctgtgggatctaatacaatggcttcaggtggtggcggaccaatggcagacgataaccaaggcgccgacggagtgggtaatgcctcgggaaattggcattgcgattccacatggctgggcgacagagtcatcaccaccagcacccgaacctgggtcctgcccacctacaacaaccacatctacaagcaaatctccagcgaatcgggagccaccaatgacaaccactacttcggctacagcaccccctgggggtattttgacttcaacagattccactgccacttctcaccacgtgactggcagcgactcatcaacaacaactggggattccgacccaagcgactcaacttcaagatcttcaacatccaggtcaaagaagtcacgcagatcgagggcggctcgaccatcgccaataaccttaccagcacgattcaggtctttgcggactcggagtaccagctgccctacgtcctcggatcggctcaccagggctgcctcccgccgttcccggccgatgtcttcatgattccccagtacgggtacctgactctgaacaacggcagccaatcagtgggacgctcttccttttactgcctggaatatttcccatcccagatgctgagaactggaaataactttcaattcagctatacctttgaaagcgtgcctttccacagcagctacgcgcacagccagagcctggaccgcatcatgaaccccctggtggaccagtacctgtactacctggccagaactcagacgggtaccggaagcaccacgagcaacacgcggcagctgcagttttaccaggccgggccttccaacatggctgaccaatccaggaactggttgcctgggcccatgtaccggcagcagcgggtctccaagactctggaccaaaacagcaacaccaactttgcctggacggctgccagcaaatacaacctaaatggacgcaaatcattggttaatcctggcattgccatggcgactcacaaggacgacgaggagcgcttcttccctcaacacggggttctggtctttgggaaaacaaacgctaccaacaagaccaccctggagaacgtcctggtaacggatgaagaagaagtcaaggcgactaacccggtggccacagaggaatatgggactgtttccagcaacctgcagtctaacacaaccaatcccaccacagagactgtcaacaatcagggaatacttcctggtatggtctggcaggaccgggacgtgtacctgcagggtcccatttgggccaaaattcctcacacggacggacactttcacccgtctcccctgatgggcggctttggactgaagcacccgcctccccagattctcatcaagaacaccccggtacctgcgaatcctccagagacttttaccacttccaagtttgccagctacatcacacagtacagcaccggacaggtcagcgtggaaattgaatgggagctgcagaaggaaaacagcaagcgatggaacccagagatacagtacacttccaactacgcgaaatccaacaatgtggagttctccgcggacgcagccggtgtttattctgaaccccgccctattggtactcgttacctcacccgtaatctgtaa

SEQ ID NO: 333 - DNA, 2220 bp, Adeno-Associated Virus
  source 1..2220: mol_type = other DNA; note = BMN_0266
atggctgctgacggttatcttccagattggctcgaggacaacctctctgaaggcatccgtgagtggtgggcgctgaaacctggagccccacaacccaaagcgaatcaacaacatcaggacaacagcaggggtcttgtgcttcctgggtacaagtacctcggacccttcaacggactcgacaagggagagccggtcaacgaggcagacgccgcggccctcgagcacgacaaggcctacgacaagcagctcgagcagggggacaacccgtacctcaagtacaaccacgcggacgccgagtttcaggagcgtcttcaagaagatacgtcttttgggggcaacctcgggcgagcagtcttccaggccaaaaagaggattctcgagcctctgggtctggttgaggaagtggctaagacggctcctggaaagaagcgacctctagagaaaacccccaatcagcccacggacactcaggccgccgggcagactccagccaagaaaaggccacagggcgagcaatctggcgactccgctagaaggcagctcgactttgatccacaaccagcagcacccatcggacaaccccccgcagccccctctcctgtgggatctaatacaatggcttcaggtggtggcggaccaatggcagacgataaccaaggcgccgacggagtgggtaatgcctcgggaaattggcattgcgattccacatggctgggcgacagagtcatcaccaccagcacccgaacctgggtcctgcccacctacaacaaccacatctacaagcaaatctccagcgaatcgggagccaccaatgacaaccactacttcggctacagcaccccctgggggtattttgacttcaacagattccactgccacttttcaccacgtgactggcagcgactcatcaacaacaactggggattccgacccaagcgactcaacttcaagatcttcaacatccaggtcaaagaagtcacgcagatcgagggcggctcgaccatcgccaataaccttaccagcacgattcaggtctttgcggactcggagtaccagcttccctacgtcctcgggtcggctcaccagggctgcctcccgccgttcccggccgatgtcttcatgattccccagtacggatacctgactctgaacaacggcagccaatcagtgggacgctcttccttttactgcctggaatatttcccatcccagatgctgagaactggaaataactttcaattcagctatacctttgaaagcgtgcctttccacagcagctacgcgcacagccagagcctggaccgcatcatgaaccccctggtggaccagtacctgtactacctggccagaactcagacgggtaccggaagcaccaccagcaacacgcggcagctgcagttttaccaggccgggccttccaacatggctgaccaatccaggaactggttgcctgggcccatgtaccggcagcagcgggtctccaagactctggaccaaaacagcaacaccaactttgcctggacggctgccagcaaatacaacctgaatggacgcaaatcattggctaatcctggcattgccatggcgactcacaaggatgacgaggagcgcttttttcctcagcacagggttctggtgtttggacagacaaatgctaccaacaagacaactttggacaatgttttaattactagtgaagaagaaattaaggcgaccaatccggtggccacggaggagtacgggactgtttctagcaacctacaagcaagtaacaccgaccccacaacggaaactgtcaacaaccagggcatacttcctggtatggtctggcaggaccgggacgtgtacctgcagggtcccatttgggtcaaaattcctcacacggacggacactttcacccgtctcccctgatgggcggctttggtctgaagcacccgcctccccagattctcatcaaaaacaccccggtacctgcgaatcctccagagacttttaccacttccaagtttgccagctacaccacacagtacagcaccggacaggtcagcgtggaaattgaatgggggctgcagaaggaaaacagcaagagatggaacccagaaattcagtacacttccaactacgcgaaatccaacaatgtggagttctccgtggatgcagccggtgtttattctgaaccccgccctattggtactcgttacctcacccgtaatctgtaa

SEQ ID NO: 334 - DNA, 2220 bp, Adeno-Associated Virus
  source 1..2220: mol_type = other DNA; note = BMN_0267
atggctgctgacggttatcttccagattggctcgaggacaacctctctgaaggcatccgtgagtggtgggcgctgaaacctggagccccacaacccaaagcgaatcaacaacatcaggacaacagcaggggtcttgtgcttcctgggtacaagtacctcggacccttcaacggactcgacaagggagagccggtcaacgaggcatacgccgcggccctcgagcacgacaaggcctacgacaagcagctcgagcagggggacaacccgtacctcaagtacaaccacgcggacgccgagtttcaggagcgtcttcaagaagatacgtcttttgggggcaacctcgggcgagcagtcttccaggccaaaaagaggattcccgagcctctgggtctggttgaggaagcggctaagacggctcctggaaagaagcgacctctagagaaaacccccaatcagcccacggacactcaggccgccgggcagactccagccaagaaaaggccacagggcgagcaatctggcgactccgctagaaggcagctcgactttgatccacaaccagcagcacccatcggacaaccccccgcagccccctctcctgtgggatctaatacaatggcttcaggtggtggcggaccaatggcagacgataaccaaggcgccgacggagtgggtaatgcctcgggaaattggcattgcgattccacatggctgggcgacagagtcatcaccaccagcacccgaacctgggtcctgcccacctacaacaaccacatctacaagcaaatctccagcgaatcgggagccaccaatgacaaccactacttcggctacagcaccccctgggggtattttgacttcaacagattccactgccacttttcaccacgtgactggcagcgactcatcaacaacaactggggattccgacccaagcgactcaacttcaagatcttcaacatccaggtcaaagaagtcacgcagatcgagggcggctcgaccatcgccaataaccttaccagcacgattcaggtctttgcggactcggagtaccagcttccctacgtcctcgggtcggctcaccagggctgcctcccgccgttcccggccgatgtcttcatgattccccagtacggatacctgactctgaacaacggcagccaatcagtgggacgcccttccttttactgcctggaatatttcccatcccagatgctgagaactggaaataactttcaattcagctatacctttgaaagcgtgcctttccacagcagctacgcgcacagccagagcctggaccgcatcatgaaccccctggtggaccaatacctgtactacctggccagaactcagacgggtaccggaagcaccaccagcaacacgcggcagctgcagttttaccaggccgggccttccaacatggctgaccaatccaggaactggttgcctgggcccatgtaccggcagcagcgggtctccaagactctggaccaaaacagcaacaccaactttgcctggacggctgccagcaaatacaacctgaatggacgcaaatcattggctaatcctggcattgccatggcgactcacaaggatgacgaggagcgcttttttcctcaacacggggttctggtgtttggacagacaaatgctaccaacaagacaactttggacaatgttttaattactagtgaagaagaaattaaggcgaccaatccggtggccacggaggagtacgggactgtttctagcaacctacaagcaagtaacaccaaccccacaacggaaacggtcaacaaccagggcatacttcctggtatggtctggcaggaccgggacgtgtacctgcagggtcccatttgggccaaaattcctcacacggacggacactttcacccgtctcccctgatgggcggctttggtctgaagcacccgcctccccagattctcatcaaaaacaccccggtacctgcgaatcctccagagacttttaccacttccaagtttgccagctacatcacacagtacagcaccggacaggtcagcgtggaaattgaatgggagctgcagaaggaaaacagcaagagatggaacccagaaattcagtacacttccaactacgcgaaatccaacaatgtggagttctccgtggatgcagccggtgtttattctgaaccccgccctattggtactcgttacctcacccgtaatctgtaa

SEQ ID NO: 335 - DNA, 2220 bp, Adeno-Associated Virus
  source 1..2220: mol_type = other DNA; note = BMN_0268
atggctgctgacggttatcttccagattggctcgaggacaacctctctgaaggcatccgtgagtggtgggcgctgaaacctggagccccacaacccaaagcgaatcaacaacatcaggacaacagcaggggtcttgtgcttcctgggtacaagtacctcggacccttcaacggactcgacaagggagagccggtcaacgaggcagacgccgcggccctcgagcacgacaaggcctacgacaagcagctcgagcagggggacaacccgtacctcaagtacaaccacgcggacgccgagtttcaggagcgtcttcaagaagatacgtcttttgggggcaacctcgggcgagcagtcttccaggccaaaaagaggattctcgagcctctgggtctggttgaggaagcggctgagacggctcctggaaagaagcgacctctagagaaaacccccaatcagcccacggacactcaggccgccgggcagactccagccaagaaaaggccacagggcgagcaatctggcgactccgctagaaggcagctcgactttgatccacaaccagcagcacccatcggacaaccccccgcagccccctctcctgtgggatctaatacaatggcttcaggtggtggcggaccaatggcagacgataaccaaggcgccgacggagtgggtaatgcctcgggaaattggcattgcgattccacatggctgggcgacagagtcatcaccaccagcacccgaacctgggtcctgcccacctacaacaaccacatctacaagcaaatctccagcgaatcgggagccaccaatgacaaccactacttcggctacagcaccccctgggggtattttgacttcaacagattccactgccacttttcaccacgtgactggcagcgactcatcaacaacaactggggattccgacccaagcgactcaacttcaagatcttcaacatccaggtcaaagaagtcacgcagaccgagggcggctcgaccatcgccaataaccttaccagcacgattcaggtctttgcggactcggagtaccagcttccctacgtcctcgggtcggctcaccagggctgcctcccgccgttcccggccgatgtcttcatgattccccagtacggatacctgactctgaacaacggcagccaatcagtgggacgctcttccttttactgcctggaatatttcccatcccagatgctgagaactggaaataactttcaattcagctatacctttgaaagcgtgcctttccacagcagctacgcgcacagccagagcctggaccgcatcataaaccccctggtggaccagtacctgtactacctggccagaactcagacgggtaccggaagcaccaccagcaacacgcggcagctgcagttttaccaggccgggccttccaacatggctgaccaatccaggaactggttgcctgggcccatgtaccggcagcagcgggtctccaagactctggaccaaaacagcaacaccaactttgcctggacggctgccagcaaatacaacctgaatggacgcaaatcattggctaatcctggcattgccatggcgactcacaaggatgacgaggagcgcttttttcctcagcacggggttctggtgtttggacagacaaatgctaccaacaagacaactttggacaatgttttaattactagtgaagaagaaattaaggcgaccaatccggtggccacggaggagtacgggactgtttctagcaacctacaagcaagtaacaccaaccccacaacggaaactgtcaacaaccagggcatacttcctggtatggtctggcaggaccgggacgtgtacctgcagggtcccatttgggccaaaattcctcacacggacggacactttcacccgtctcccctgatgggcggctttggtctgaagcacccgcctccccagattctcatcaaaaacaccccggtacctgcgaatcctccagagacttttaccacttccaagtttgccagctacatcacacagtacagcaccggacaggtcagcgtggaaattgaatgggagctgcagaaggaaaacagcaagagatggaacccagaaattcagtacacttccaactacgcgaaatccaacaatgtggagttctccgtggatgcagccggtgtttattctgaaccccgccctattggtactcgttacctcacccgtaatctgtaa

SEQ ID NO: 336 - DNA, 2220 bp, Adeno-Associated Virus
  source 1..2220: mol_type = other DNA; note = BMN_0269
atggctgctgacggttatcttccagattggctcgaggacaacctctctgaaggcatccgtgggtggtgggcgctgaaacctggagccccgcaacccaaagcgaatcaacaacatcaggacaacagcaggggtcttgtgcttcctgggtacaagtacctcggacccttcaacggactcgacaagggagagccggtcaacgaggcagacgccgcggccctcgagcacgacaaggcctacgacaagcagctcgagcagggggacaacccgtgcctcaagtacaaccacgcggacgccgagtttcaggagcgtcttcaagaagatacgtcttttgggggcaacctcgggcgagcagtcttccaggccaaaaagaggattctcgagcctctgggtctggttgaggaagcggctaagacggctcctggaaagaagcgacctctagagaaaacccccaatcagcccacggacactcaggccgccgggcagactccagccaagaaaaggccacagggcgagcaatctggcgactccgctagaaggcagctcgacttcgatccacaaccagcagcacccatcggacaaccccccgcagccccctctcctgtgggatctaatacaatggcttcaggtggtggcggaccaatggcagacgataaccaaggcgccgacggagtgggtaatgcctcgggaaattggcattgcgattccacatggctgggcgacagagtcatcaccaccagcacccgaacctgggtcctgcccacctacaacaaccacatctacaagcaaatctccagcgaatcgggagccaccaatgacaaccactacttcggctacagcaccccctgggggtattttgacttcaacagattccactgccacttttcaccacgtgactggcagcgactcatcaacaacaactggggattccgacccaagcgactcaacttcaagatcttcaacatccaggtcaaagaagtcacgcagatcgagggcggctcgaccatcgccaataaccttaccagcacgattcaggtctttgcggactcggagtaccagcttccctacgtcctcgggtcggctcaccaaggctgcctcccgccgttcccggccgatgtcttcatgattccccagtacggatacctgactctgaacaacggcagccaatcagtgggacgctcttccttttactgcctggaatatttcccatcccagatgctgagaactggaaataactttcaattcagctatacctttgaaagcgtgcctttccacagcagctacgcgcacagccagagcctggaccgcatcatgaaccccctggtggaccagtacctgtactacctggccagaactcagacgggtaccggaagcaccaccagcaacacgcggcagctgcagttttaccaggccgggccttccaacatggctgaccaatccaggaactggttgcctgggcccatgtaccggcagcagcgggtctccaagactctggaccaaaacagcaacaccaactttgcctggacggctgccagcaaatacaacctgaatggacgcaaatcattggctaatcctggcattgccatggcgactcacaaggatgacgaggagcgcttttttcctcagcacggggttctggtgtttggacagacaaatgctaccaacaagacaactttggacaatgttttaattactagtgaagaagaaattaaggcgaccaatccggtggccacggaggagtacgggactgtttctagcaacctacaagcaagtaacaccaaccccacaacggaaactgtcaacaaccagggcatacttcctggtatggtctggcaggaccgggacgtgtacctgcagggtcccacttgggccaaaattcctcacacggacggacactttcacccgtctcccctgatgggcggctttggtctgaagcacccgcctccccagattctcatcaaaaacaccccggtacctgcgaatcctccagagacttttaccacttccaagtttgccagctacatcacacagtacagcaccggacaggtcagcgtggaaattgaatgggagctgcagaaggaaaacagcaagagatggaacccagaaattcagtacacttccaactacgcgaaatccaacaatgtggagttctccgtggatgcagccggtgtttattctgaaccccgccctattggtactcgttacctcacccgtaatctgtag

SEQ ID NO: 337 - DNA, 2220 bp, Adeno-Associated Virus
  source 1..2220: mol_type = other DNA; note = BMN_0270
atggctgctgacggttatcttccagattggctcgaggacaacctctctgaaggcatccgtgagtggtgggcgctgaaacctggagccccacaacccaaagcgaatcaacaacatcaggacaacagcaggggtcttgtgcttcctgggtacaagtacctcggacccttcaacggactcgacaagggagagccggtcaacgaggcagacgccgcggccctcgagcacgacaaggcctacgacaagcagctcgagcagggggacaacccgtacctcaagtacaaccacgcggacgccgagtttcaggagcgtcttcaagaagatacgtcttttgggggcaacctcgggcgagcagtcttccaggccaaaaagaggattctcgagcctctgggtctggttgaggaagcggctaagacggctcctggaaagaagcgacctctagagaaaacccccaatcagcccacggacactcaggccgccgggcagactccagccaagaaaaggccacagggcgagcaatctggcgactccgctagaaggcagctcgactttgatccacaaccagcagcacccatcggacaaccccccgcagccccctctcctgtgggatctaatacaatggcttcaggtggtggcggaccaatggcagacgataaccaaggcgccgacggagtgggtaatgcctcgggaaattggcattgcgattccacatggctgggcgacagagtcatcaccaccagcacccgaacctgggtcctgcccacctacaacaaccacatctacaagcaaatctccagcgaatcgggagccaccaatgacaaccactacttcggctacagcaccccctgggggtattttgacttcaacagattccactgccacttttcaccacgtgactggcagcgactcatcaacaacaactggggattccgacccaagcgactcaacttcaagatcttcaacatccaggtcaaagaagtcacgcagatcgagggcggctcgaccatcgccaataaccttaccagcacgattcaggtctttgcggactcggagtaccagcttccctacgtcctcgggtcggctcaccagggctgcctcccgccgttcccggccgatgtcttcatgattccccagtacggatacctgactctgaacaacggcagccaatcagtgggacgctcttccttttactgcctggaatatttcccatcccagatgctgagaactggaaatagctttcaattcagctatacctttgaaagcgtgcctttccacagcagctacgcgcacagccagagcctggaccgcatcatgaaccccctggtggaccagtacctgtactacctggccagaactcagacgggtaccggaagcaccaccagcaacacgcggcagctgcagttttaccaggccgggccttccaacatggctgaccaatccaggaactggttgcctgggcccatgtaccggcagcagcgggtctccaagactctggaccaaaacagcaacaccaactttgcctggacggctgccagcaaatacaacctgaatggacgcaaatcattggctaatcctggcattgccatggcgactcacaaggatgacgaggagcgcttttttcctcagcacggggttctggtgtttggacagacaaatgctaccaacaagacaactttggacaatgttttaattactagtgaagaagaaattaaggcgaccaatccggtggccacggaggagtacgggactgtttctagcaacctacaagcaagtaacaccaaccccacaacggaaactgtcaacaaccagggcatacttcctggtatggtctggcaggaccgggacgtgtacctgcagggtcccatttgggccaaaattcctcacacggacggacactttcacccgtctcccctgatgggcggctttggtctgaagcacccgcctccccagattctcatcaaaaacaccccggtacctgcgaatcctccagagacttttaccacttccaagtttgccagctacatcacacagtacagcaccggacaggtcagcgtggaaattgaatgggagctgcagaaggaaaacagcaagagatggaacccagaaattcagtacacttccaactacgcgaaatccaacaatgtggagttctccgtggatgcagccggtgtttattctgaaccccgccctattggtactcgttacctcacccgtaatctgtaa

SEQ ID NO: 338 - DNA, 2220 bp, Adeno-Associated Virus
  source 1..2220: mol_type = other DNA; note = BMN_0271
atggctgctgacggttatcttccagattggctcgaggacaacctctctgaaggcatccgtgagtggtgggcgctgaaacctggagccccacaacccaaagcgaatcaacaacatcaggacaacagcaggggtcttgtgcttcctgggtacaagtacctcggacccttcaacggactcgacaagggagagccggtcaacggggcagacgccgcggccctcgagcacgacaaggcctacgacaagcagctcgagcagggggacaacccgtacctcaagtacaaccacgcagacgccgagtttcaggagcgtcttcaagaagatacgtcttttgggggcaacctcgggcgagcagtcttccaggccaaaaagaggattctcgagcctctgggtctggttgaggaagcggctaagacggctcctggaaagaagcgacctctagagaaaacccccaaccagcccacggacacccaggccgccgggcagactccagccaagaaaaggccacagggcgagcaatctggcgactccgctagaaggcagctcgactttgatccacaaccagcagctcccatcggacaaccccccgcagccccctctcctgtgggatctaatacaatggcttcaggtggtggcggaccaatggcagacgataaccaaggcgccgacggagtgggtaatgcctcgggaaattggcattgcgattccacatggctgggcgacagagtcatcaccaccagcacccgaacctgggtcctgcccacctacaacaaccacatctacaagcaaatctccagcgaatcgggagccaccaatgacaaccactacttcggctacagcaccccctgggggtattttgacttcaacagattccactgccacttctcaccacgtgactggcagcgactcatcaacaacaactggggattccgacccaagcgactcaacttcaagatcttcaacatccaggtcaaagaagtcacgcagatcgagggcggctcgaccatcgccaataaccttaccagcacgattcaggtctttgcggactcggagtaccagctgccctacgtcctcggatcggctcaccagggctgcctcccgccgttcccggccgatgtcttcatgattccccagtacggatacctgactctgaacaacggcagccaatcagtgggacgctcttccttttactgcctggaatatttcccatcccagatgctgagaactggaaataactttcaattcagctatacctttgaaagcgtgcctttccacagcagctacgcgcacagccagagcctggaccgcatcatgaaccccctggtggaccagtacctgtactacctggccagaactcagacgggtaccggaagcaccacgagcaacacgcggcagctgcagttttaccaggccgggccttccaacatggctgaccaatccaggaactggttgcctgggcccatgtaccggcagcagcgggtctccaagactctggaccaaaacagcaacaccaactttgcctggacggctgccagcaaatacaacctaaatggacgcaaatcattggttaatcctggcattgccatggcgactcacaaggacgacgaggagcgcttcttccctcaacacggggttctggtctttgggaaaacaaacgctaccaacaagaccaccctggagaacgtcctggtaacggatgaagaagaagtcaaggcgactaacccggtggccacagaggaatatgggactgtttccagcaacctgcagtctaacacaaccaatcccaccacagagactgtcaacaatcagggaatacttcctggtatggtctggcaggaccgggacgtgtacctgcagggtcccatttgggccaaaattcctcacacggacggacactttcacccgtctcccctgatgggcggctttggactgaagcacccgcctccccagattctcatcaagaacaccccggtacctgcgaatcctccagagacttttaccacttccaagtttgccagctacatcacacagtacagcaccggacaggtcagcgtggaaattgaatgggagctgcagaaggaaaacagcaagcgatggaacccagagatacagtacacttccaactacgcgaaatccaacaatgtggagttctccgtggacgcagccggtgtttattctgaaccccgccttattggtactcgttacctcacccgtaatctgtaa

SEQ ID NO: 339 - DNA, 2220 bp, Adeno-Associated Virus
  source 1..2220: mol_type = other DNA; note = BMN_0272
atggctgctgacggttatcttccagattggctcgaggacaacctctctgaaggcatccgtgagtggtgggcgctgaaacctggagccccacaacccaaagcgaatcaacaacatcaggacaacagcaggggtcttgtgcttcctgggtacaagtacctcggacccttcaacggactcgacaagggagagccggtcaacgaggcagacgccgcggccctcgagcacgacaaggcctacgacaagcagctcgagcagggggacaacccgtacctcaagtacaaccacgcagacgccgagtttcaggagcgtcttcaagaagatacgtcttttgggggcaacctcgggcgagcagtcttccaggccaaaaagaggattctcgagcctctgggtctggttgaggaagcggctaagacggctcctggaaagaagcgacctctagagaaaacccccaaccagcccacggacacccaggccgccgggcagactccagccaagaaaaggccacagggcgagcaatctggcgactccgctagaaggcagctcgactttgatccacaaccagcagctcccatcggacaaccccccgcagccccctctcctgtgggatctaatacaatggcttcaggtggtggcggaccaatggcagacgataaccaaggcgccgacggagtgggtaatgcctcgggaaattggcattgcgattccacatggctgggcgacagagtcatcaccaccagcacccgaacctgggtcctgcccacctacaacaaccacatctacaagcaaatctccagcgaatcgggagccaccaatgacaaccactatttcggctacagcaccccctgggggtattttgacttcaacagattccactgccacttctcaccacgtgactggcagcgactcatcaacaacaactggggattccgacccaagcgactcaacttcaagatcttcaacatccaggtcaaagaagtcacgcagatcgagggcggctcgaccatcgccaataaccttaccagcacgattcaggtctttgcggactcggagtaccagctgccctacgtcctcggatcggctcaccagggctgcctcccgccgttcccggccgatgtcttcatgattccccagtacggatacctgactctgaacaacggcagccaatcagtgggacgctcttccttttactgcctggaatatttcccatcccagatgctgagaactggaaataactttcaattcagctatacctttgaaagcgtgcctttccacagcagctacgcgcacagccagagcctggaccgcatcatgaaccccctggtggaccagtacctgtactacctggccagaactcagacgggtaccggaagcaccacgagcaacacgcggcagctgcagttttaccaggccgggccttccaacatggctgatcaatccaggaactggttgcctgggcccatgtaccggcagcagcgggtctccaagactctggaccaaaacagcaacaccaactttgcctggacggctgccagcaaatacaacctaaatggacgcaaatcattggttaatcctggcattgccatggcgactcacaaggacgacgaggagcgcttcttccctcaacacggggttctggtctttgggaaaacaaacgctaccaacaagaccaccctggagaacgtcctggtaacggatgaagaagaagtcaaggcgactaacccggtggccacagaggaatatgggactgtttccagcaacctgcagtctaacacaaccaatcccaccacagagactgtcaacaatcagggaatacttcctggtatggtctggcaggaccgggacgtgtacctgcagggtcccatttgggccaaaattcctcacacggacggacactttcacccgtctcccctgatgggcggctttggactgaagcacccgcctccccagattctcatcaagaacaccccggtacctgcgaatcctccagagacttttaccacttccaagtttgccagctacatcacacagtacagcaccggacaggtcagcgtggaaattgaatgggagctgcagaaggaaaacagcaagcgatggaacccagagatacagtacacttccaactacgcgaaatccaacaatgtggagttctccgtggacgcagccggtgtttattctgaaccccgccctattggtactcgttacctcacccgtaatctgtaa

SEQ ID NO: 340 - DNA, 2220 bp, Adeno-Associated Virus
  source 1..2220: mol_type = other DNA; note = BMN_0273
atggctgctgacggttatcttccagattggctcgaggacaacctctctgaaggcatccgtgagtggtgggcgctgaaacctggagccccacaacccaaagcgaatcaacaacatcaggacaacagcaggggtcttgtgcttcctgggtacaagtacctcggacccttcaacggactcgacaagggagagccggtcaacgaggcagacgccgcggccctcgagcacgacaaggcctacgacaagcagctcgagcagggggacaacccgtacctcaagtacaaccacgcagacgccgagtttcaggagcgtcttcaagaagatacgtcttttgggggcaacctcgggcgagcagtcttccaggccaaaaagaggattctcgagcctctgggtctggttgaggaagcggctaagacggctcctggaaagaagcgacctctagagaaaacccccaaccagcccacggacacccaggccgccgggcagactccagccaagaaaaggccacagggcgagcaatctggcgactccgctagaaggcagctcgactttgatccacaaccagcagctcccatcggacaaccccccgcagccccctctcctgtgggatctaatacaatggcttcaggtggtggcggaccaatggcagacgataaccaaggcgccgacggagtgggtaatgcctcgggaaattggcattgcgattccacatggctgggcgacagagtcatcaccaccagcacccgaacctgggtcctgcccacctacaacaaccacatctacaagcaaatctccagcgaatcgggagccaccaatgacaaccactacttcggctacagcaccccctgggggtattttgacttcaacagattccactgccacttctcaccacgtgactggcagcgactcatcaacaacaactggggattccgacccaagcgactcaacttcaagatcttcaacatccaggtcaaagaagtcacgcagatcgagggcggctcgaccatcgccaataaccttaccagcacgattcaggtctttgcggactcggagtaccagctgccctacgtcctcggatcggctcaccagggctgcctcccgccgttcccggccgatgtcttcatgattccccagtacggatacctgactctgaacaacggcagccaatcagtgggacgctcttccttttactgcctggaatatttcccatcccagatgctgagaactggaaataactttcaattcagctatacctttgaaagcgtgcctttccacagcagctacgcgcacagccagagcctggaccgcatcatgaaccccctggtggaccagtacctgtactacctggccagaactcagacgggtaccggaagcaccacgagcaacacgcggcagctgcagttttaccaggccgggccttccaacatggctgaccaatccaggaactggttgcctgggcccatgtaccggcagcagcgggtctccaagactctggaccaagacagcaacaccaactttgcctggacggctgccagcaaatacaacctaaatggacgcaaatcattggttaatcctggcattgccatggcgactcacaaggacgacgaggagcgcttcttccctcaacacggggttctggtctttgggaaaacaaacgctaccaacaagaccaccctggagaacgtcctggtaacggatgaagaagaagtcaaggcgactaacccggtggccacagaggaatatgggactgtttccagcaacctgcagtctaacacaaccaatcccaccacagagactgtcaacaatcagggaatacttcctggtatggcctggcaggaccgggacgtgtacctgcagggtcccatttgggccaaaattcctcacacggacggacactttcacccgtctcccctgatgggcggctttggactgaagcacccgcctccccagattctcatcaagaacaccccggtacctgcgaatcctccagagacttttaccacttccaagtttgccagctacatcacacagtacagcaccggacaggtcagcgtggaaattgaatgggagctgcagaaggaaaacagcaagcgatggaacccagagatacagtacacttccaactacgcgaaatccaacaatgtggagttctccgtggacgcagccggtgtttattctgaaccccgccctattggtactcgttacctcacccgtaatctgtaa

SEQ ID NO: 341 - DNA, 2211 bp, Adeno-Associated Virus
  source 1..2211: mol_type = other DNA; note = BMN_0302
atggctgccgatggttatcttccagattggctcgaggacaacctctctgagggcattcgcgagtggtgggacttgaaacctggagccccgaaacccaaagccaaccagcaaaagcaggacgacggccggggtctggtgcttcctggctacaagtaccccggacccttcaacggactcgacaagggggagcccgtcaacgcggcggacgcagcggccctcgagcacgacaaggcctacgaccagcagctcaaagcgggtgacaatccgtacctgcggtataaccacgccgacgccgagtttcaggagcgtctgcaagaagatacgtcttttgggggcaacctcgggcgagcagtcttccaggccaagaagcgggttttcgaacctctcggtctggttgaggaaggcgctaagacggctcctggaaagaagagaccggtagagcagtcgccacaagagccagactcctcctcgggcattggcaagacaggccagcagcccgctaaaaagagactcaattttggtcagactggcgactcagagtcagtccccgacccacaacctctcggagaacctccagcagccccctcaggtctgggacctaatacaatggcttcaggcggtggcgctccaatggcagacaataacgaaggcgccgacggagtgggtaattcctcgggaaattggcattgcgattccacatggctgggggacagagtcatcaccaccagcacccgaacctgggccctgcccacctacaacaaccacctctacaagcaaatctccaacagcacctcgggaggaagcaccaacgacaacacctactttggctacagcaccccctgggggtattttgacttcaacagattccactgccacttttcaccacgtgactggcagcgactcatcaacaacaattggggattccggcccaagagactcaacttcaagctcttcaacatccaggtcaaggaagtcacgacgaacgaaggcaccaagaccatcgccaataatctcaccagcaccgtgcaggtctttacggactcggagtaccagctaccgtacgtgctaggatcagctcaccagggatgtctgcctccgttcccggcggacgtcttcatggttcctcagtacggttatttaactcttaacaatggcagccaggccctgggacgttcctccttctactgcctggagtatttcccgtcgcagatgctgagaaccggcaacaactttcagttcagctacaccttcgaggacgtgcctttccacagcagctacgcgcacagccagagcctggacaggctgatgaatcccctcatcgaccagtacctgtattacctggtcagaacgcagacgaccggaactggagggacgcagactctggcattcagccaagcaggtcctagctcgatggccaaccaggctagaaactgggtgcccggaccgagctaccggcagcagcgcgtctccacgacaaaaaaccagaacaacaacagcaactttgcctggacgggagctgccaagtttaagctgaacggccgaaactctctaatgaaccctggcgtggccatggcttcccacaaggatgacgaagaccgcttcttcccttcgagcggggtgctgatttttggcaagcaaggagccgggaacgatggagtggattacagccaagtgctgattacagacgaggaagaaataaaggctaccaaccccgtggccacagaggaatacggagaagtggccatcaacgaccaggccgctaatacgcaggcgcagaccggacttgtgcacaaccagggggtgattcccggcatggtgtggcagaacagagacgtgtacctgcagggtcccatctgggccaaaattcctcacacggacggcaactttcacccgtctcccctaatgggcggctttggactgatgcacccgcctcctcagattctcatcaagaacacaccggttccagcggacccgccgcttaccttcaaccaggccaagctgaactctttcatcacgcagtacagcaccggacaggtcagcgtggaaatcgagtgggagttgcagaaagaaaacagcaaacgctggaatccagagattcaatacacttccaactactacaaatctacaaatgtggactttgctgtcaacagtgacggagtttatagcgagcctcgccccattggcacccgttacctcacccgcaacctgtaa

SEQ ID NO: 342 - DNA, 2211 bp, Adeno-Associated Virus
  source 1..2211: mol_type = other DNA; note = BMN_0303
atggctgccgatggttatcttccagattggctcgaggacaacctctctgagggcattcgcgagtggtgggacttgaaacctggagccccgaaacccaaagccaaccagcaaaagcaggacgacggccggggtctggtgcttcctggctacaagtacctcggacccttcaacggactcgacaagggggagcccgtcaacgcggcggacgcagcggccctcgagcacgacaaggcctacgaccagcagctcaaagcgggtgacaatccgtacctgcggtataaccacgccgacgccgagtttcaggggcgtctgcaagaagatacgtcttttgggggcaacctcgggcgagcagtcttccaggccaagaagcgggttctcgaacctctcggtctggttgaggaaggcgctaagacggctcctggaaagaagagaccggtagagcagtcgccacaagagccagactcctcctcgggcattggcaagacaggccagcagcccgctaaaaagagactcaattttggtcagactggcgactcagagtcagtccccgacccacaacctctcggagaacctccagcagccccctcaggtctgggacctaatacaatggcttcaggcggtggcgctccaatggcagacaataacgaaggcgccgacggagtgggtaattcctcgggaaattggcattgcgattccacatggctgggggacagagtcatcaccaccagcacccgaacctgggccctgcccacctacaacaaccacctctacaagcaaatctccaacagcacctcgggaggaagcaccaacgacaacacctactttggctacagcaccccctgggggtattttgacttcaacagattccactgccacttttcaccacgtgactggcagcgactcatcaacaacaattggggattccggcccaagagacccaacttcaagctcttcaacatccaggtcaaggaagtcacgacgaacgaaggcaccaagaccatcgccaataatctcaccagcaccgtgcaggcctttacggactcggagtaccagctaccgtacgtgctaggatcagctcaccagggatgtctgcctccgttcccggcggacgtcttcatggttcctcagtacggttatttaactcttaacaatggcagccaggccctgggacgttcctccttctactgcctggagtatttcccgtcgcagatgctgagaaccggcaacaactttcagttcagctacaccttcgaggacgtgcctttccacagcagctacgcgcacagccagagcctggacaggctgatgaatcccctcatcgaccagtacctgtattacctggtcagaacgcagacgaccggaactggagggacgcagactctggcattcagccaagcaggtcctagctcgatggccaaccaggctagaaactgggtgcccggaccgagctaccggcagcagcgcgtctccacgacaaaaaaccagaacaacaacagcaactttgcctggacgggagctgccaagtttaagctgaacggccgaaactctctaatgaaccctggcgtggccatggcttcccacaaggatgacgaagaccgcttctccccttcgagcggggtgctgatttttggcaagcaaggagccgggaacgatggagtggattacagccaagtgctgattacagacgaggaagaaataaaggctaccaaccccgtggccacagaggaatacggagaagtggccatcaacgaccaggccgctaatacgcaggcgcagaccggacttgtgcacaaccagggggtgattcccggcatggtgtggcagaacagagacgtgtacctgcagggtcccatctgggccaaaattcctcacacggacggcaactttcacccgtctcccctaatgggcggctttggactgaagcacccgcctcctcagattctcatcaagaacacaccggttccagcggacccgccgcttaccttcaaccaggccaagctgaactctttcatcacgcagtacagcaccggacaggtcagcgtggaaatcgagtgggagttgcagaaagaaaacagcaaacgctggaatccagagattcaatacacttccaactactacaaatctacaaatgtggactttgctgtcaacagtgacggagtttatagcgagcctcgccccattggcacccgttacctcacccgcaacctgtaa

SEQ ID NO: 343 - DNA, 2211 bp, Adeno-Associated Virus
  source 1..2211: mol_type = other DNA; note = BMN_0304
atggctgccgatggttatcttccagattggctcgaggacaacctctctgagggcattcgcgagtggtgggacttgaaacctggagccccgaaacccaaagccaaccagcaaaagcaggacgacggccggggtctggtgcttcctggctacaagtacctcggacccttcaacggactcgacaagggggagcccgtcaacgcggcggacgcagcggccctcgagcacgacaaggcctacgaccagcagctcaaagcgggtgacaatccgtacctgcggtataaccacgccgacgccgagtttcaggggcgtctgcaagaagatacgtcttttgggggcaacctcgggcgagcagtcttccaggccaagaagcgggttctcgaacctctcggtctggttgaggaaggcgctaagacggctcctggaaagaagagaccggtagagcagtcgccacaagagccagactcctcctcgggcattggcaagacaggccagcagcccgctaaaaagagactcaattttggtcagactggcgactcagagtcagtccccgacccacaacctctcggagaacctccagcagccccctcaggtctgggacctaatacaatggcttcaggcggtggcgctccaatggcagacaataacgaaggcgccgacggagtgggtaattcctcgggaaattggcattgcgattccacatggctgggggacagagtcatcaccaccagcacccgaacctgggccctgcccacctacaacaaccacctctacaagcaaatctccaacagcacctcgggaggaagcaccaacgacaacacctactttggctacagcaccccctgggggtattttgacttcaacagattccactgccacttttcaccacgtgactggcagcgactcatcaacaacaattggggattccggcccaagagactcaacttcaagctcttcaacatccaggtcaaggaagtcacgacgaacgaaggcaccaagaccatcgccaataatctcaccagcaccgtgcaggtctttacggactcggagtaccagctaccgtacgtgctaggatcagctcaccagggatgtctgcctccgttcccggcggacgtcttcatggttcctcagtacggttatttaactcttaacaatggcagccaggccctgggacgttcctccttctactgcctggagtatttcccgtcgcagatgctgagaaccggcaacaactttcagttcagctacaccttcgaggacgtgcctttccacagcagctacgcgcacagccagagcctggacaggctgatgaatcccctcatcgaccagtacctgtattacctggtcagaacgcagacgaccggaactggagggacgcagattctggcattcagccaagcaggtcctagctcgatggccaaccaggctagaaactgggtgcccggaccgagctaccggcagcagcgcgtctccacgacaaaaaaccagaacaacaacagcaactttgcctggacgggagctgccaagtttaagctgaacggccgaaactctctaatgaaccctggcgtggccatggcttcccacaaggatgacgaagaccgcttcttcccttcgagcggggtgctgatttttggcaagcaaggagccgggaacgatggaatggattacagccaagtgctgattacagacgaggaagaaataaaggctaccaaccccgtggccacagaggaatacggagaagtggccatcaacgaccaggccgctaatacgcaggcgcagaccggacttgtgcacaaccagggggtgattcccggcatggtgtggcagaacagagacgtgtacctgcagggtcccatctgggccaaaattcctcacacggacggcaactttcacccgtctcccctaatgggcggctttggactgaagcacccgcctcctcagattctcatcaagaacacaccggttccagcggacccgccgcttaccttcaaccaggccaagctgaactctttcatcacgcagtacagcaccggacaggtcagcgtggaaatcgagtgggagttgcagaaagaaaacagcaaacgctggaatccagagattcaatacacttccaactactacaaatctacaaatgtggactttgctgtcaacagtgacggagtttatagcgagcctcgccccattggcacccgttacctcacccgcaacctgtaa

SEQ ID NO: 344 - DNA, 2211 bp, Adeno-Associated Virus
  source 1..2211: mol_type = other DNA; note = BMN_0305
atggctgccgatggttatcttccagattggctcgaggacaacctctctgagggcattcgcgagtggtgggacttgaaacctggagccccgaaacccaaagccaaccagcaaaagcaggacgacggccggggtctggtgcttcctggctacaagtacctcggacccttcaacggactcgacaagggggagcccgtcaacgcggcggacgcagcggccctcgagcacgacaaggcctacgaccagcagctcaaagcgggtgacaatccgtacctgcggtataaccacgccgacgccgagtttcaggagcgtctgcaagaagatacgtcttttgggggcaacctcgggcgagcagtcttccaggccaagaagcgggttctcgaacctctcggtctggttgaggaaggcgctaagacggctcctggaaagaagagaccggtagagcagtcgccacaagagccagactcctcctcgggcattggcaagacaggccagcagcccgctaaaaagagactcaattttggtcagactggcgactcagagtcagtccccgacccacaacctctcggagaacctccagcagccccctcaggtctgggacctaatacaatggcttcaggcggtggcgctccaatggcagacaataacgaaggcgccgacggagtgggtaattcctcgggaaattggcattgcgattccacatggctgggggacagagtcatcaccaccagcacccgaacctgggccctgcccacctacaacaaccacctctacaagcaaatctccaacagcacctcgggaggaggcaccaacgacaacacctactttggctacagcaccccctgggggtattttgacttcaacagattccactgccacttttcaccacgtgactggcagcgactcatcaacaacaattggggattccggcccaagagactcaacttcaagctcttcaacatccaggtcaaggaagtcacgacgaacgaaggcaccaagaccatcgccaataatctcaccagcaccgtgcaggtctttacggactcggagtaccagctaccgtacgtgctaggatcagctcaccagggatgtctgcctccgttcccggcggacgtcttcatggttcctcagtacggtcatttaactcttaacaatggcagccaggccctgggacgttcctccttctactgcctggagtatttcccgtcgcagatgctgagaaccggcaacaactttcagttcagctacaccttcgaggacgtgcctttccacagcagctacgcgcacagccagagcctggacaggctgatgaatcccctcatcgaccagtacctgtattacctggtcagaacgcagacgaccggaactggagggacgcagactctggcattcagccaagcaggtcctagctcgatggccaaccaggctagaaactgggtgcccggaccgagctaccggcagcagcgcgtctccacgacaaaagaccagaacaacaacagcaactttgcctggacgggagctgccaagtttaagctgaacggccgaaactctctaatgaaccctggcgtggccatggcttcccacaaggatgacgaagaccgcttcttcccttcgagcggggtgctgatttttggcaagcaaggagccgggaacgatggagtggattacagccaagtgctgattacagacgaggaagaaataaaggctaccaaccccgtggccacagaggaatacggagaagtggccgtcaacgaccaggccgctaatacgcaggcgcagaccggacttgtgcacaaccagggggtgattcccggcatggtgtggcagaacagagacgtgtacctgcagggtcccatctgggccaaaattcctcacacggacggcaactttcacccgtctcccctaatgggcggctttggactgaagcacccgcctcctcagattctcatcaagaacacaccggttccagcggacccgccgcttaccctcaaccaggccaagctgaactctttcatcacgcagtacagcaccggacaggtcagcgtggaaatcgagtgggagttgcagaaagaaaacagcaaacgctggaatccagagattcaatacacttccaactactacaaatctacaaatgtggactttgctgtcaacagtgacggagtttatagcgagcctcgccccattggcacccgttacctcacccgcaacctgtaa

SEQ ID NO: 345 - DNA, 2211 bp, Adeno-Associated Virus
  source 1..2211: mol_type = other DNA; note = BMN_0306
atggctgccgatggttatcttccagattggctcgaggacaacctctctgagggcattcgcgagtggtgggacttgaaacctggagccccgaaacccaaagccaaccagcaaaagcaggacgacggccggggtctggtgcttcctggctacaagtacctcggacccttcaacggactcgacaagggggagcccgccaacgcggcggacgcagcggccctcgagcacgacaaggcctacgaccagcagctcaaagcgggtgacaatccgtacctgcggtataaccacgccgacgccgagtttcaggagcgtctgcaagaagatacgtcttttgggggcaacctcgggcgagcaatcttccaggccaagaagcgggttcttgaacctctcggtctggttgaagaaggcgctaagacggctcctggaaagaagggaccggtagagcagtcgccacaagagccagactcctcctcgggcattggcaagacaggccagcagcccgctaaaaagagactcaattttggtcagactggcgactcagagtcagtccccgacccacaacctctcggagaacctccagcagccccctcaggtctgggacctaatacaatggcttcaggcggtggcgctccaatggcagacaataacgaaggcgccgacggagtgggtaattcctcgggaaattggcattgcgattccacatggctgggggacagagtcatcaccaccagcacccgaacctgggccctgcccacctacaacaaccacctctacaagcaaatctccaacggcacctcgggaggaagcaccaacgacaacacctactttggctacagcaccccctgggggtattttgacttcaacagattccactgccacttttcaccacgtgactggcagcgactcatcaacaacaattggggattccggcccaagagactcaacttcaagctcttcaacatccaggtcaaggaagtcacgacgaacgaaggcaccaagaccatcgccaataatctcaccagcaccgtgcaggtctttacggactcggagtaccagctaccgtacgtgctaggatcagctcaccagggctgtttgcctccgttcccggcagacgtcttcatggttcctcagtacggctatttaactctgaacaatggcagccaggccctgggacgttcctccttctactgcctggagtatttcccatcgcagatgctgagaaccggcaacaactttcagttcagctacaccttcgaggacgtgcctttccacagcagctacgcgcacagccagagcctggacaggctgatgaaccccctcatcgaccagtacctgtattatctggtcagaacgcagacgactggaactggagggacgcagactctggcattcagccaagcaggtcctagctcaatggccaaccaggctagaaactgggtgcccggaccttgctaccggcagcagcgcgtctccacaacaaccaaccagaacaacaacagcaactttgcctggacgggagctgccaagtttaagctgaacggccgagactctctaatgaatcccggcgtggccatggcttcccacaaggatgacgacgaccgcttcttcccttcgagcggggtcctgatttttggcaagcaaggaaccgggaacgatggagtggattacagccaagtgctgattacagacgaagaagaaataaaggctaccaaccccgtggccacagaggaatatggagcagtggccatcaacaaccaggccgctaatacgcaggcgcaaaccggactcgtgcacaaccagggggtgattcccggcatggtgtggcagaacagagacgtgtacctgcagggtcccatctgggccaaaattcctcacactgacggcaactttcacccgtcccccctgatgggcggctttggactgaagcacccgcctcctcaaattctcatcaagaacacaccggttccagcggacccgccgcttaccttcaaccaggccaagctgaactctttcatcacgcagtacagcaccggacaggtcagcgtggaaatcgagtgggagctgcagaaagaaaacagcaaacgctggaatccagagattcaatacacttccaactactacaaatctacgaatgtggactttgctgtcaacacggaaggagtttatagcgagcctcgccccattggcacccgttacctcacccgcaacctgtaa

SEQ ID NO: 346 - DNA, 2211 bp, Adeno-Associated Virus
  source 1..2211: mol_type = other DNA; note = BMN_0307
atggctgccgatggttatcttccagattggctcgaggacaacctctctgagggcattcgcgagtggtgggacttgaaacctggagccccgaaacccaaagccaaccagcaaaagcaggacgacggccggggtctggtgcttcctggctacaagtacctcggacccttcaacggactcgacaagggggagcccgtcaacgcggcggacgcagcggccctcgagcacgacaaggcctacgaccagcagctcaaagcgggtgacaatccgtacctgcggtataaccacgccgacgccgagtttcaggagcgtctgcaagaagatacgtcttttgggggcaacctcgggcgagcaatcttccaggccaagaagcgggttctcgaacctctcggtctggttgaagaaggcgctaagacggctcctggaaagaagagaccggtagagcagtcgccacaagagccagactcctcctcgggcattggcaagacaggccagcagcccgctaaaaagagactcaattttggtcagactggcgactcagagtcagtccccgacccacaacctctcggagaacctccagcagccccctcaggtctgggacctaatacaatggcttcaggcggtggcgctccaatggcagacaataacgaaggcgccgacggagtgggtaatccctcgggaaattggcattgcgattccacacggctgggggacagagtcatcaccaccagcacccgaacctgggccctgcccacctacaacaaccacctctacaagcaaatctccaacggcacctcgggaggaagcaccaacgacaacacctactttggctacagcaccccctgggggtattttgacttcaacagattccactgccacttttcaccacgtgactggcagcgactcatcaacaacaattggggattccggcccaagagactcaacttcaagctcttcaacatccaggtcaaggaagtcacgacgaacgaaggcaccaagaccatcgccaataatctcaccagcaccgtgcaggtctttacggactcggagtaccagctaccgtacgtgctaggatcagctcaccagggctgtttgcctccgttcccggcagacgtcttcatggttcctcagtacggctatttaactctgaacaatggcagccaggccctgggacgttcctccttctactgcctggagtatttcccatcgcagatgctgagaaccagcaacaactttcagttcagctacaccttcgaggacgtgcctttccacagcagctacgcgcacagccagagcctggacaggctgatgaaccccctcatcgaccagtacctgtattatctggtcagaacgcagacgactggaactggagggacgcagactctggcattcagccaagcaggtcctagctcaatggccaaccaggctagaaactgggtgcccggaccttgctaccggcagcagcgcgtctccacaacaaccaaccagaacaacaacagcaactttgcctggacgggagctgccaagtttaagctgaacggccgagactctctaatgaatcccggcgtggccatggcttcccacaaggatgacgacgaccgcttcttcccttcgagcggggtcctgatttttggcaagcaaggaaccgggaacgatggagtggattacagccaagtgctgattacagacgaagaagaaataaaggctaccaaccccgtggccacagaggaatatggagcagtggccatcaacaaccaggccgctaatacgcaggcgcaaaccggactcgtgcacaaccagggggtgattcccggcatggtgtggcagaacagagacgtgtacctgcagggtcccatctgggccaaaattcctcacactgacggcaactttcacccgtcccccctgatgggcggctttggactgaagctcccgcctcctcaaattctcatcaagaacacaccggttccagcggacccgccgcttaccttcaaccaggccaagctgaactctttcatcacgcagtacagcaccggacaggtcagcgtggaaatcgagtgggagctgcagaaagaaaacagcaaacgctggaatccagagattcaatacacttccaactactacaaatctacgaatgtggactttgctgtcaacacggaaggagtttatagcgagcctcgccccattggcacccgttacctcacccgcaacctgtaa

SEQ ID NO: 347 - DNA, 2211 bp, Adeno-Associated Virus
  source 1..2211: mol_type = other DNA; note = BMN_0308
atggctgccgatggttatcttccagattggctcgaggacaacctctctgagggcattcgcgagtggtgggacttgaaacctggagccccgaaacccaaagccaaccagcaaaagcaggacgacggccggggtctggtgcttcctggctacaagtacctcggacccttcaacggactcgacaagggggagcccgtcaacgcggcggacgcagcggccctcgagcacgacaaggcctacgaccagcagctcaaagcgggtgacaatccgtacctgcggtataaccacgccgacgccgagtttcaggagcgtctgcaagaagatacgtcttttgggggcaacctcgggcgagcaatcttccaggccaagaagcgggttctcgaacctctcggtctggttgaagaaggcgctaagacggctcctggaaagaagagaccggtagagcagtcgccacaagagccagactccccctcgggcattggcaagacaggccagcagcccgctaaaaagagactcaattttggtcagactggcgactcagagtcagtccccgacccacaacctctcggagaacctccagcagccccctcaggtctgggacctaatacaatggcttcaggcggtggcgctccaatggcagacaataacgaaggcgccgacggagtgggtaattcctcgggaaattggcattgcgattccacatggctgggggacagagtcatcaccaccagcacccgaacctgggccctgcccacctacaacaaccacctctacaagcaaatctccaacggcacctcgggaggaagcaccaacgacaacacctactttggctacagcaccccctgggggtattttgacttcaacagattccactgccacttttcaccacgtgactggcagcgactcatcaacaacaattggggattccggcccaagagactcaacttcaagctcttcaacatccaggtcaaggaagtcacgacgaacgaaggcaccaagaccatcgccaataatctcaccagcaccgtgcaggtctttacggactcggagtaccagctaccgtacgtgctaggatcagctcaccagggctgtttgcctccgttcccggcagacgtcttcatggttcctcagtacggctatttaactctgaacaatggcagccaggccctgggacgttcctccttctactgcctggagtatttcccatcgcagatgctgagaaccggcaacaactttcagttcagctacaccttcgaggacgtgcctttccacagcagctacgcgcacagccagagcctggacaggctgatgaaccccctcatcgaccagtacctgtattatctggtcagaacgcagacgactggaactggagggacgcagactctggcattcagccaagcaggtcctagctcaatggccaaccaggctagaaactgggtgcccggaccttgctaccggcagcagcgcgtctccacaacaaccaaccagaacaacaacagcaactttgcctggacgggagctgccaagtttaagctgaacggccgagactccctaatgaatcccggcgtggccatggcttcccacaaggatgacgacgaccgcttcttcccttcgagcggggtcctgatttttggcaagcaaggaaccgggaacgatggagtggattacagccaagtgctgattacagacgaagaggaaataaaggctaccaaccccgtggccacagaggaatatggagcagtggccatcaacaaccaggccgctaatacgcaggcgcaaaccggactcgtgcacaaccagggggtgattcccggcatggtgtggcagaacagagacgtgtacctgcagggtcccatctgggccaaaattcctcacactgacggcaactttcacccgtcccccctgatgggcggctttggactgaagcacccgcctcctcaaattctcatcaagaacacaccggttccagcggacccgccgcttaccttcaaccaggccaagctgaactctttcatcacgcagtacagcaccggacaggtcagcgtggaaatcgagtgggagctgcagaaagaaaacagcaaacgctggaatccagagattcaatacacttccaactactacaaatctacgaatgtggactttgctgtcaacacggaaggagtttatagcgagcctcgccccattggcacccgttacctcacccgcaacctgtaa

SEQ ID NO: 348 - DNA, 2211 bp, Adeno-Associated Virus
  source 1..2211: mol_type = other DNA; note = BMN_0309
atggctgccgatggttatcttccagattggctcgaggacaacctctctgagggcattcgcgagtggtgggacttgaaacctggagccccgaaacccaaagccaaccagcaaaagcaggacgacggccggggtctggtgcttcctggctacaagtacctcggacccttcaacggactcgacaagggggagcccgtcaacgcggcggacgcagcggccctcgagcacgacaaggcctacgaccagcagctcaaagcgggtgacaatccgtacctgcggtataaccacgccgacgccgagtttcaggagcgtctgcaagaagatacgtcttttgggggcaacctcgggcgagcaatcttccaggccaagaggcgggttctcgaacctctcggtctggttgaagaaggcgctaagacggctcctggaaagaagagaccggtagagcagtcgccacaagagccagactcctcctcgggcattggcaagacaggccagcagcccgctaaaaagagactcaattttggtcagactggcgactcagagtcagtccccgacccacaacctctcggagaacctccagcagccccctcaggtctgggacctaatacaatggcttcaggcggtggcgctccaatggcagacaataacgaaggcgccgacggagtgggtaattcctcgggaaattggcattgcgattccacatggctgggggacagagtcatcaccaccagcacccgaacctgggccctgcccacctacaacaaccacctctacaagcaaatctccaacggcacctcgggaggaagcaccaacgacaacacctactttggctacagcaccccctgggggtattttgacttcaacagattccactgccacttttcaccacgtgactggcagcgactcatcaacaacaattggggattccggcccaagagactcaacttcaagctcttcaacatccaggtcaaggaagtcacgacgaacgaaggcaccaagaccatcgccaataatctcaccagcaccgtgcaggtctttacggactcggagtaccagctaccgtacgtgctaggatcagctcaccagggctgtttgcctccgttcccggcagacgtcttcatggttcctcagtacggctatttaactctgaacaatggcagccaggccctgggacgttcctccttctactgcctggagtatttcccatcgcagatgctgaggaccagcaacaactttcagttcagctacaccttcgaggacgtgcctttccacagcagctgcgcgcacagccagagcctggacaggctgatgaaccccctcatcgaccagtacctgtattatctggtcagaacgcagacgactggaactggagggacgcagactctggcattcagccaagcaggtcctggctcaatggccaaccaggctagaaactgggtgcccggaccttgctaccggcagcagcgcgtctccacaacaaccaaccagaacaacaacagcaactttgcctggacgggagctgccaagtttaagctgaacggccgagactctctaatgaatcccggcgtggccatggcttcccacaaggatgacgacgaccgcttcttcccttcgagcggggtcctgatttttggcaagcaaggaaccgggaacgatggagtggattacagccaagtgctgattacagacgaagaagaaataaaggctaccaaccccgtggccacagaggaatatggagcagtggccatcaacaaccaggccgctaatacgcaggcgcaaaccggactcgtgcacaaccagggggtgattcccggcatggtgtggcagaacagagacgtgtacctgcagggtcccatctgggccaaaattcctcacactgacggcaactttcacccgccccccctgatgggcggctttggactgaagcacccgcctcctcaaattctcatcaagaacacaccggttccagcggacccgccgcttaccttcaaccaggccaagctgaactctttcatcacgcagtacagcaccggacaggtcagcgtggaaatcgagtgggagctgcagaaagaaaacagcaaacgctggaatccagagattcaatacacttccaactactacaaatctacgaatgtggactttgctgtcaacacggaaggagtttatagcgagcctcgccccattggcacccgttacctcacccgcaacctgtaa

SEQ ID NO: 349 - DNA, 2211 bp, Adeno-Associated Virus
  source 1..2211: mol_type = other DNA; note = BMN_0310
atggctgccgatggttatcttccagattggctcgaggacaacctctctgagggcattcgcgagtggtgggacttgaaacctggagccccgaagcccaaagccaaccagcaaaagcaggacgacggccggggtctggtgtttcctggctacaagtacctcggacccttcaacggactcgacaagggggagcccgtcaacgcggcggacgcagcggccctcgagcacgacaaggcctacgaccagcagctcaaagcgggtgacaatccgtacctgcggtataaccacgccgacgccgagtttcaggagcgtctgcaagaagatacgtcttttgggggcaacctcgggcgagcaatcttccaggccaagaagcgggttctcgaacctctcggtctggttgaagaaggcgctaagacggctcctggaaagaagagaccggtagagcagtcgccacaagagccagactcctcctcgggcattggcaagacaggccggcagcccgctaaaaagagactcaattttggtcagactggcgactcagagtcagtccccgacccacaacctctcggagaacctccagcagccccctcaggtctgggacctaatacaatggcttcaggcggtggcgctccaatggcagacaataacgaaggcgccgacggagtgggtaattcctcgggaaattggcattgcgattccacatggctgggggacagagtcatcaccaccagcacccgaacctgggccctgcccacctacaacaaccacctctacaagcaaatctccaacggcaccccgggaggaagcaccaacgacaacacctactttggctacagcgccccctgggggtattttgacttcaacagattccactgccacttttcaccacgtgactggcagcgactcatcaacaacaattggggattccggcccaagagactcaacttcaagctcttcaacatccaggtcaaggaagtcacgacgaacgaaggcaccaagaccatcgccaataatctcaccagcaccgtgcaggtctttacggactcggagtaccagctaccgtacgtgctaggatcagctcaccagggctgtttgcctccgttcccggcagacgtcttcatggttcctcagtacggctatttaactctgaacaatggcagccaggccctgggacgttcctccttctactgcctggagtatttcccatcgcagatgctgagaaccggcaacaactttcagttcagctacaccttcgaggacgtgcctttccacagcagctacgcgcacagccagagcctggacaggctgatgaaccccctcatcgaccagtacctgtattatctggtcagaacgcagacgactggaactggagggacgcagactctggcattcagccaagcaggtcctagctcaatggccaaccaggctagaaactgggtgcccggaccttgctaccggcagcagcgcgtctccacaacaaccaaccagaacaacaacagcaactttgcctggacgggagctgccaagtttaagctgaacggccgagactctctaatgaatcccggcgtggccatggcttcccacaaggatgacgacgaccgcttcttcccttcgagcggggtcctgatttttggcaagcaaggaaccgggaacgatggagtggattacagccaagtgctgattacagacgaagaagaaataaaggctaccaaccccgtggccacagaggaatatggagcagtggccatcaacaaccaggccgctaatacgcaggcgcaaaccggactcgtgcacaaccagggggtgattcccggcatggtgtggcagaacagagacgtgtaccagcagggtcccatctgggccaaaattccccacactgacggcaactttcacccgtcccccctgatgggcggctttggactgaagcacccgcctcctcaaattctcatcaagaacacaccggttccagcggacccgccgcttaccttcaaccaggccaagctgaactctttcatcacgcagtacagcaccggacaggtcagcgtggaaatcgagtgggagctgcagaaagaaaacagcaaacgctggaatccagagattcaatacacttccaactactacaaatctacgaatgtggactttgctgtcaacacggaaggagtttatagcgagcctcgccccattggcacccgttacctcacccgcaacctgtaa

SEQ ID NO: 350 - DNA, 2211 bp, Adeno-Associated Virus
  source 1..2211: mol_type = other DNA; note = BMN_0311
atggctgccgatggttatcttccagattggctcgaggacaacctctctgagggcattcgcgagtggtgggacttgaaacctggagccccgaaacccaaagccaaccagcaaaagcaggacgacggccggggtctggtgcttcctggctacaagtacctcggacccttcaacggactcgacaagggggagcccgtcaacgcggcggacgcagcggccctcgagcacgacaaggcctacgaccagcagctcaaagcgggtgacaatccgtacctgcggtataaccacgccgacgccgagtttcaggagcgtctgcaagaagatacgtcttttgggggcaacctcgggcgagcaatcttccaggccaagaagcgggttctcgaacctctcggtctggttgaagaaggcgctaagacggctcctggaaagaagagaccggtagagcagtcgccacaagagccagactcctcctcgggcattggcaagacaggccagcagcccgctaaaaagagactcaattctggtcagactggcgactcagagtcagtccccgacccacaacctctcggagaacctccagcagccccctcaggtctgggacctaatacaatggcttcaggcggtggcgctccaatggcagacaataacgaaggcgccgacggagtgggtaattcctcgggaaattggcattgcgattccacatggctgggggacagagtcatcaccaccagcacccgaacctgggccctgcccacctacaacaaccacctctacaagcaaatctccaacggcacctcgggaggaagcaccaacgacaacacctactttggctacagcaccccctgggggtattttgacttcaacagattccactgccacttttcaccacgtgactggcagcgactcatcaacaacaattggggattccggcccaagagactcaacttcaagctcttcaacatccaggtcaaggaagtcacgacgaacgaaggcaccaagaccatcgccaataatctcaccagcaccgtgcaggtctttacggactcggagtaccagctaccgtacgtgctaggatcagcttaccagggctgtttgcctccgttcccggcagacgtcttcatggttcctcagtacggctatttaactctgaacaatggcagccaggccctgggacgttcctccttctactgcctggagtatttcccatcgcagatgctgagaaccggcaacaactttcagtccagctacaccttcgaggacgtgcctttccacagcagctacgcgcacagccagagcctggacaggctgatgaaccccctcatcgaccagtacctgtattatctggtcagaacgcagacgactggaactggagggacgcagactctggcattcagccaagcaggtcctagctcaatggccaaccaggctagaaactgggtgcccggaccttgctaccggcagcagcgcgtctccacaacaaccaatcagaacaacaacagcaactttgcctggacgggagctgccaagtttaagctgaacggccgagactctctaatgaatcccggcgtggccatggcttcccacaaggatgacgacgaccgcttcttcccttcgagcggggtcctgatttttggcaagcaaggaaccgggaacgatggagtggattacagccaagtgctgattacagacgaagaagaaataaaggctaccaaccccgtggccacagaggaatacggagcagtggccatcaacaaccaggccgctaatacgcaggcgcaaaccggactcgtgcacaaccagggggtgattcccggcatggtgtggcagaacagagacgtgtacctgcagggtcccatctgggccaaaattcctcacactgacggcaactttcacccgtcccccctgatgggcggctttggactgaagcacccgcctcctcaaattctcatcaagaacacaccggttccagcggacccgccgcttaccttcaaccaggccaagctgaactctttcatcacgcagtacagcaccggacaggtcagcgtggaaatcgagtgggagctgcagaaagaaaacagcaaacgctggaatccagagattcaatacacttccaactactacaaatctacgaatgtggactttgctgtcaacacggaaggagtttatagcgagcctcgccccattggcacccgttacctcacccgcaacctgtaa

SEQ ID NO: 351 - DNA, 2211 bp, Adeno-Associated Virus
  source 1..2211: mol_type = other DNA; note = BMN_0312
atggctgccgatggttatcttccagattggctcgaggacaacctctctgagggcattcgcgagtggtgggacttgaaacctggagcctcgaaacccaaagccaaccagcaaaagcaggacgacggccggggtctggtgcttcctggctacaagtacctcggacccttcaacggactcgacaagggggagcccgtcaacgcggcggacgcagcggccctcgagcacgacaaggcctacgaccagcagctcaaagcgggtgacaatccgtacctgcggtataaccacgccgacgccgagtttcaggagcgtctgcaagaagatacgtcttttgggggcaacctcgggcgagcagtcttccaggccaagaagcgggttctcgaacctctcggtctggttgaagaaggcgctaagacggttcctggaaagaagagaccggtagagcagtcgccacaagagccagactcctcctcgggcattggcaagacaggccagcagcccgctaaaaagagactcaattttggtcagactggcgactcagagtcagtccccgacccacaacctctcggagaacctccagcagccccctcaggtctgggacctaatacaatggcttcaggcggtggcgctccaatggcagacaataacgaaggcgccgacggagtgggtaattcctcgggaaattggcattgcgattccacatggctgggggacagagtcatcaccaccagcacccgaacctgggccctgcccacctacaacaaccacctctacaagcaaatctccaacggcacctcgggaggaagcaccaacgacaacacctactttggctacagcaccccctgggggtattttgacttcaacagattccactgccacttttcaccacgtgactggcagcgactcatcaacaacaattggggattccggcccaagagactcaacttcaagctcttcaacatccaggtcaaggaagtcacgacgaacgaaggcaccaagaccatcgccaataatctcaccagcaccgtgcaggtctttacggactcggagtaccagctaccgtacgtgctaggatcagcttaccagggctgtttgcctccgttcccggcagacgtcttcatggttcctcagtacggctatttaactctgaacaatggcagccaggccctgggacgttcctccttctactgcctggagtatttcccatcgcagatgctgagaaccggcaacaactttcagttcagctacaccttcgaggacgtgcctttccacagcagctacgcgcacagccagagcctggacaggctgatgaaccccctcatcgaccagtacctgtattatctggtcagaacgcagacgactggaactggagggacgcagactctggcattcagccaagcaggtcctagctcaatggccaaccaggctagaaactgggtgcccggaccttgctaccggcagcagcgcgtctccacaacaaccaaccagaacaacaacagcaactttgcctggacgggagctgccaagtttaagctgaacggccgagactctctaatgaatcccggcgtggccatggcttcccacaaggatgacgacgaccgcttcttcccttcgagcggggtcctgatttttggcaagcaaggaaccgggaacgatggagtggattacagccaagtgctgattacagacgaagaagaaataaaggctaccaaccccgtggccacagaggaatatggagcagtggccatcaacaaccaggccgctaatacgcaggcgcaaaccggactcgtgcacaaccagggggtgattcccggcatggtgtggcagaacagagacgtgtacctgcagggtcccatctgggccaaaattcctcacactgacggcaactttcacccgtcccccctgatgggcggctttggactgaagcacccgcctcctcaaattctcatcaagaacacaccggttccagcggacccgccgcttaccttcaaccaggccaagctgaactctttcatcacgcagtacagcaccggacaggtcagcgtggaaatcgagtgggagctgcagaaagaaaacagcaaacgctggaatccagagattcaatacacttccaactactacaaatctacgaatgtggactttgctgtcaacacggaaggagtttatagcgagcctcgccccattggcacccgttacctcacccgcaacctgtaa

SEQ ID NO: 352 - DNA, 2211 bp, Adeno-Associated Virus; identical to SEQ ID NO: 351
  source 1..2211: mol_type = other DNA; note = BMN_0313

SEQ ID NO: 353 - DNA, 2211 bp, Adeno-Associated Virus
  source 1..2211: mol_type = other DNA; note = BMN_0314
atggctgccgatggttatcttccagattggctcgaggacaacctctctgagggcattcgcgagtggtgggacctgaaacctggagccccgaaacccaaagccaaccagcaaaagcaggacgacggccggggtctggtgcttcctggctacaagtacctcggacccttcaacggactcgacaagggggagcccgtcaacgcggcggacgcagcggccctcgagcacgacaaggcctacgaccagcagctcaaagcgggtgacaatccgtacctgcggtacaatcacgccgacgccgagtttcaggagcgtctgcaagaagatacgtcatttgggggcaacctcgggcgagcagtcttccaggccaagaagcgggttctcgaacctctcggtctggttgaggaaggcgctaagacggctcctggaaagaagagaccggtagagcagtcaccccaagaaccagactcatcctcgggcatcggcaaaacaggccagcagcccgctaaaaagagactcaattttggtcagactggcgacacagagtcagtccccgacccacaacctctcagagaacctccagcagccccctcaggtctgggacctaatacaatggcttcaggcggtggcgctccaatggcagacaataacgaaggcgccgacggagtgggtaattcctcgggaaattggcattgcgattccacatggctgggggacagagtcatcaccaccagcacccgaacctgggcattgccaacctacaacaaccacctctacaagcaaatctccaacggtacctcgggaggaagcacgaacgacaacacctactttggctacagcaccccctgggggtattttgacttcaacagattccactgccacttctcaccacgtgactggcagcgactcatcaacaacaactggggattccggcccaagagactcaacttcaagccgttcaacatccaggtcaaggaggtcacgacgaacgaaggcaccaagaccatcgccaataaccccaccagtaccgtccaggtctttacggactcggagtaccagctaccgtacgtgctaggctccgcccgtcaaggatgcctgcctccgtttcctgcggacgtcttcatggttcctcagtacggctacctgacgctcaacaatggcagtcaggctttgggacgttcttccttctactgtctggaatacttcccttctcagatgctgagaaccggcgacaactttcagttcagctacactttcgaggacgtgcctttccacagcagctacgcgcacagccagagtctggatcggctgatgaaccccctcatcgaccagtacctctactacctggtcagaacacagacgactggaactgggggaactcagactttggcattcagccaagcaggccctagctcaatggccaatcaggctagaaactgggtacccgggccttgctaccgtcagcagcgcgtctccacaaccaccaaccaaaataacaacagcaactttgcgtggacgggagctgctaaattcaagctgaacggcagagactcgctaatgaatcctggcgtggctatggcatcgcacaaagacgacgaggaccgcttctttccatcgagtggcgttctcatatttggcaagcagggagccggaaacgatggagtcgactacagccaggttctaattacagatgaagaagaaattaaagccaccaaccctgtcgccacagaggaatacggagcagtagccatcaacaaccaggccgctaacacgctggcgcaaactggactggtgcataaccagggagttattcctggtatggtctggcagaatcgggacgtgtacctgcagggccctatttgggctaaaatacctcacacggatggcaactttcacccgtctcctcttatgggtggatttggactcaaacatccgcctcctcagattctaatcaaaaacacgccggtgccggcagatcctcctcttaccttcaatcaagcaaagctaaactccttcatcacgcagtacagcacgggacaagtcagcgtggaaatcgagtgggagctgcagaaggagaacagcaagcgctggaacccagagattcagtacacttccaactattataaatctacaaatgtggactttgctgttaatactgagggtgtttactctgagcctcgccccattggcactcgttacctcacccgtaatctgtaa

SEQ ID NO: 354 - DNA, 2211 bp, Adeno-Associated Virus
  source 1..2211: mol_type = other DNA; note = BMN_0315
atggctgccgatggttatcttccagattggctcgaggacaacctctctgagggcattcgcgagtggtgggacctgaaacctggagccccgaaacccaaagccaaccagcaaaagcaggacgacggccggggtctggtgcttcctggctacaagtacctcggacccttcaacggactcgacaagggggagcccgtcaacgcggcggacgcagcggccctcgagcacgacaaggcctacgaccagcagctcaaagcgggtgacaatccgtacctgcggtataatcacgccgacgccgagtttcaggagcgtctgcaagaagatacgtcatttgggggcaacctcgggcgagcagtcttccaggccaagaagcgggttctcgaacctctcggtctggttgaggaaggcgctaacacggctcctggaaagaagagaccggtagagcagtcaccccaagaaccagactcatcctcgggcatcggcaaaacaggccagcagcccgctaaaaagagactcaattttggtcagactggcgactcagagtcagtccccgacccacaacctctcagagaacctccagcagccccctcaggtctgggacctaatacaatggcttcaggcggtggcgctccaatggcagacaataacgaaggcgccgacggagtgggtaattcctcgggaaattggcattgcgattccacatggctgggggacagagtcatcaccaccagcacccgaacctgggcattgccaacctacaacaaccacctctacaagcaaatctccaacggtacctcgggaggaagcacgaacgacaacacctactttggctacagcaccccctgggggtattttgacttcaacagattccactgccacttctcaccacgtgactggcagcgactcatcaacagcaactggggattccggcccaagagactcaacttcaagctgttcaacatccaggtcaaggaggtcacgacgaacgaaggcaccaagaccatcgccaataacctcaccagtaccgtccaggtctttacggactcggagtaccagctaccgtacgtgctaggctccgcccatcaaggatgcctgcctccgtttcctgcggacgtcttcatggttcctcagtacggctacctgacgctcaacaatggcagccaggctttgggacgttcttccttctactgtctggaatacttcccttctcagatgctgagaaccggcaacaactttcagttcagctacactttcgaggacgtgcctttccacagcagctacgcgcacagccagagtctggatcggctgatgaaccccctcatcgaccagtacctctactacctggtcagaacacagacaactggaactgggggaactcagactttggcattcagccaagcaggccctagctcaatggccaatcaggctagaaactgggtacccgggccttgctaccgtcagcagcgcgtctccacaaccaccaaccaaaataacaacagcaactttgcgtggacgggagctgctaaattcaagctgaacggcagagactcgctaatgaatcctggcgtggctatggcatcgcacaaagacgacgaggaccgcttctttccatcgagtggcgttctcatatttggcaagcagggagccggaaacgatggagtcgactacagccaggttctaattacagatgaagaagaaattaaagccaccaaccctgtcgccacagaggaatacggagcagtagccatcaacaaccaggccgctaacacgcaggcgcaaactggactggtgcataaccagggagttattcctggtatggtctggcagaatcgggacgtgtacctgcagggccctatttgggctaaaatacctcacacggatggcaactttcacccgtctcctcttatgggtggatttggactcaaacatccgcctcctcagattctaatcaaaaacacaccggtgccggcagatcctcctcttaccttcaatcaagcaaagctaaactccttcatcacgcagtacagcacgggacaagtcagcgtggaaatcgagtgggagctgcagaaggagaacagcaagcgctggaacccagagattcagtacacttccaactattataaatctacaaatgtggactttgctgttaatactgagggtgtttactctgagcctcgccccattggcactcgttacctcacccgtaatctgtaa

SEQ ID NO: 355 - DNA, 2211 bp, Adeno-Associated Virus
  source 1..2211: mol_type = other DNA; note = BMN_0316
atggctgccgatggttatcttccagattggctcgaggacaacctctctgagggcattcgcgagtggtgggcgctgaaacctggagccccgcagcccaaggcgaaccagcaaaagcaggacgacggccggggtctggtgcttcctggctacaagtacctcggacccttcaacggactcgacaagggggagcccgtcaacgaggcggacgccgcggccctcgagcacgacaaggcctacgaccagcagctcaaagcgggtgacaatccgtacctgcggtataaccacgccgacgccgagtttcaggagcgtcttcaagaagatacgtctttcgggggcaacctcgggcgagcagtcttccaggccaagaagcgggttctcgaacctctgggcctggtcgaggaggcagctaagacggctcctggaaagaagaggcctgtagagcagtctcctcaggaaccggactcctccgcgggtattggcaaatcgggtgcacagcccgctaaaaagagactcaatttcggtcagactggcgacacagagtcagtccccgaccctcaaccaatcggagaacctcccgcagccccctcaggtgtgggatctcttacaatggcttcaggtggtggcgcaccagtggcagacaataacgaaggtgccgatggagtgggtagttcctcgggaaattggcattgcgattcccaatggctgggggacagagtcatcaccaccagcacccgaacctgggccctgcccacctacaacaatcacctctacaagcaaatctccaacagcacatctggaggatcttcaaatgacaacgcctacttcggctacagcaccccctgggggtattttgacttcaacagattccactgccacttctcaccacgtgactggcagcgactcatcaacaacaactggggattccggcctaagcgactcaacttcaagctcttcaacattcaggtcaaagaggttacggacaacaatggagtcaagaccatcgccaataaccttaccagcacggtccaggtcttcacggactcagactatcagctcccgtacgtgcttgggtcggctcacgagggctgcctcccgccgttcccagcggacgttttcatgattcctcagtacgggtatctgacgcttaatgatggaagccaggccgtgggtcgttcgtccttttactgcctggaatattttccgtcgcaaatgcttcgtaccggaaacaactttaccttcagctacgagtttgagaacgtacctttccatagcagctacgctcacagccaaagcctggaccgactaatgaatccactcatcgaccaatacttgtactatctctcaaagactattaacggttctgggcagaatcaacaagcgctaaaattcagtgtggccggacccagcaacatggctgtccagggaagaaactacatacctggacccagctaccgacaacaacgtgtctcaaccactgtgactcaaaacaacaacagcgaatttgcttggcctggagcttcttcttgggctctcaatggacgcaatagcttgatgaatcctggacctgctatggccagccacaaagaaggagaggaccgtttctttcctttgtctggatctttaatttttggcaaacaaggaactggaagagacaacgtggatgcggacaaagtcatgataaccaacgaagaagaaattaaaactactaacccggtagcaacggagtcctatggacaagtggccacaaaccaccagagtgcccaagcacaggcgcagaccggctgggttcaaaaccaaggaatacttccgggtatggtttggcaggacagagatgtgtacctgcaaggacccatttgggccaaaattcctcacacggacggcaactttcacccttctccgctggtgggagggtttggaatgaagcacccgcctcctcagatcctcatcaaaaacacacctgtacctgcggatcctccaacggctttcaacaaggacaagctgaactctttcatcactcagtattctactggccaagtccgcgtagagattgagtgggagctgcagaaggaaaacagcaagcgctggaacccggagatccagtacacttccaactattacaagtctaataatgttgaatttgctgttaatactgaaggtgtttattctgaaccccgccccattggcaccagatacctgactcgtaatctgtaa

SEQ ID NO: 356 - DNA, 2211 bp, Adeno-Associated Virus
  source 1..2211: mol_type = other DNA; note = BMN_0317
atggctgccgatggttatcttccagattggctcgaggacaacctctctgagggcattcgcgagtggtgggcgctgaaacctggagccccgcagcccaaggcgaaccagcaaaagcaggacgacggccggggtctggtgcttcctggctacaagtacctcggacccttcaacggactcgacaagggggagcccgtcaacgaggcggacgccgcggccctcgagcacgacaaggcctacgaccagcagctcaaagcgggtgacaatccgtacctgcggtataaccacgccgacgccgagtttcaggagcgtcttcaagaagatacgtctttcgggggcaacctcgggcgagcagtcttccaggccaagaagcgggttctcgaacctctgggcctggtcgaggaggcagctaagacggctcctggaaagaagaggcctgtagagcagtctcctcaggaaccggactcctccgcgggtattggcaaatcgggtgcacagcccgctaaaaagagactcaatttcggtcagactggcgacacagagtcagtccccgaccctcaaccaatcggagaacctcccgcagccccctcaggtgtgggatctcttacaatggcttcaggtggtggcgcaccagtggcagacaataacgaaggtgccgatggagtgggtagttcctcgggaaattggcattgcgattcccaatggctgggggacagagtcatcaccaccagcacccgaacctgggccctgcccacctacaacaatcacctctacaagcaaatctccaacagcacatctggaggatcttcaaatgacaacgcctacttcggctacagcaccccctgggggtattttgacttcaacagattccactgccacttctcaccacgtgactggcagcgactcatcaacaacaactggggattccggcctaagcgactcaacttcaagctcttcaacattcaggtcaaagaggttacggacaacaatggagtcaagaccatcgccaataaccttaccagcacggtccaggtcttcacggactcagactatcagctcccgtacgtgcttgggtcggctcacgagggctgcctcccgccgttcccagcggacgttttcatgattcctcagtacgggtatctgacgcttaatgatggaagccaggccgtgggtcgttcgtccttttactgcctggaatattttccgtcgcaaatgcctcgtaccggaaacaactttaccttcagctacgagtttgagaacgtacctttccatagcagctacgctcacagccaaagcctggaccgactaatgaatccactcatcgaccaatacttgtactatctctcaaagactattaacggttctgggcagaatcaacaaacgctaaaattcagtgtggccggacccagcaacatggctgtccagggaagaaactacatacctggacccagctaccgacaacaacgtgtctcaaccactgtgactcaaaacaacaacagcgaatttgcttggcctggagcttcttcttgggctctcaatggacgcaatagcttgatgaatcctggacctgctatggccagccacaaagaaggagaggaccgtttctttcctttgtctggatctttaatttttggcaaacaaggaactggaagagacaacgtggatgcggacaaagtcatgataaccaacgaagaagaaattaaaactactaacccggtagcaacggagtcctatggacaagtggccacaaaccaccagagtgcccaagcacaggcgcagaccggctgggttcaaaaccaaggaatacttccgggtatggtttggcaggacagagatgtgtacctgcaaggacccatttgggccaaaattcctcacacggacggcaactttcacccttctccgctgatgggagggtttggaatgaagcacccgcctcctcagatcctcatcaaaaacacacctgtacctgcggatcctccaacggctttcaacaaggacaagctgaactctttcatcactcagtattctactggccaagtcagcgtagcgattgagtgggagctgcagaaggaaaacagcaagcgctggaacccggagatccagtacacttccaactattacaagtctaataatgttgaatttgctgttaatactgaaggtgtttattctgaaccccgccccattggcaccagatacctgactcgtaatctgtaa

SEQ ID NO: 357 - DNA, 2211 bp, Adeno-Associated Virus
  source 1..2211: mol_type = other DNA; note = BMN_0318
atggctgccgatggttatcttccagattggctcgaggacaacctctctgagggcattcgcgagtggtgggcgctgaaacctggagccccgcagcccaaggcgaaccagcaaaagcaggacgacggccggggtctggtgcttcctggctacaagtacctcggacccttcaacggactcgacaagggggagcccgtcaacgaggcggacgccgcggccctcgagcacgacaaggcctacgaccagcagctcaaagcgggtgacaatccgtacctgcggtataaccacgccgacgccgagtttcaggagcgtcttcaagaagatacgtctttcgggggcaacctcgggcgagcagtcttccaggccaagaagcgggttctcgaacctctgggcctggtcgaggaggcagctaagacggctcctggaaagaagaggcctgtagagcagtctcctcaggaaccggactcctccgcgggtattggcaaatcgggtgcacagcccgctaaaaagagactcaatttcggtcagactggcgacacagagtcagtccccgaccctcaaccaatcggagaacctcccgcagccccctcaggtgtgggatctcttacaatggcttcaggtggtggcgcaccagtggcagacaataacgaaggtgccgatggagtgggtagttcctcgggaaattggcattgcgattcccaatggctgggggacagagtcatcaccaccagcacccgaacctgggccctgcccacctacaacaatcacctctacaagcaaatctccaacagcacatctggaggatcttcaaatgacaacgcctacttcggctacagcaccccctgggggtattttgacttcaacagattccactgccacttctcaccacgtgactggcagcgactcatcaacaacaactggggattccggcctaagcgactcaacttcaagctcttcaacattcaggtcaaagaggttacggacaacaatggagtcaagaccatcgccaataaccttaccagcacggtccaggtcttcacggactcagactatcagctcccgtacgtgcttgggtcggctcacgagggctgcctcccgccgttcccagcggacgttttcatgattcctcagtacgggtatctgacgcttaatgatggaagccaggccgtgggtcgttcgtccttttactgcctggaatattttccgtcgcaaatgcttcgtaccggaaacaactttaccttcagctacgagtttgagaacgtacctttccatagcagctacgctcacagccaaagcctggaccgaccaatgaatccactcatcgaccaatacttgtactatctctcaaagactattaacggttctgggcagaatcaacaaacgctaaaattcagtgtggccggacccagcaacatggctgtccagggaagaaactacatacctggacccagctaccgacaacaacgtgtctcaaccactgtgactcaaaacaacaacagcgaatttgcttggcctggagcttcttcttgggctctcaatggacgcaatagcttgatgaatcctggacctgctatggccagccacaaagaaggagaggaccgtttctttcctttgtctggatctttaatttttggcaaacaaggaactggaagagacaacgtggatgcggacaaagtcatgataaccaacgaagaagaaattaaaactactaacccggtagcaacggagtcctatggacaagtggccacaaaccaccagagtgcccaagcacaggcgcagaccggctgggttcaaaaccaaggaatacttccgggtatggtttggcaggacagagatgtgtacctgcaaggacccatttgggccaaaattcctcacacggacggcaactttcacccttctccgctgatgggagggtttggaatgaagcacccgcctcctcagatcctcatcaaaaacacacctgtacctgcggatcctccaacggctttcaacaaggacaagctgaactctttcatcactcagtattctactggccaagtcagcgtagagattgagtgggagctgcagaaggaaaacagcaagcgctggaacccggagatccagtacacttccaactattacaagtctaataatgttgaatttgctgttaatactgaaggtgtttattctgaaccccgccccattggcaccagatacctgactcgtaatctgtaa

SEQ ID NO: 358 - DNA, 2211 bp, Adeno-Associated Virus
  source 1..2211: mol_type = other DNA; note = BMN_0319
atggctgccgatggttatcttccagattggctcgaggacaacctctctgagggcattcgcgagtggtgggcgctgaaacctggagccccgcagcccaaggcgaaccagcaaaagcaggacgacggccggggtctggtgcttcctggctacaagtacctcggacccttcaacggactcgacaagggggagcccgtcaacgaggcggacgccgcggccctcgagcacgacaaggcctacgaccagcagctcaaagcgggtgacaatccgtacctgcggtataaccacgccgacgccgagtttcaggagcgtcttcaagaagatacgtctttcgggggcaacctcgggcgagcagtcttccaggccaagaagcgggttctcgaacctctgggcctggtcgaggaggcagctaagacggctcctggaaagaagaggcctgtagagcagtctcctcaggaaccggactcctccgcgggtattggcaaatcgggtgcacagcccgctataaagagactcaatttcggtcagactggcgacacagagtcagtccccgaccctcaaccaatcggagaacctcccgcagccccctcaggtgtgggatctcttacaatggcttcaggtggtggcgcaccagtggcagacaataacgaaggtgccgatggagtgggtagttcctcgggaaattggcattgcgattcccaatggctgggggacagagtcatcaccaccagcatccgaacctgggccctgcccacctacaacaatcacctctacaagcaaatctccaacagcacatctggaggatcttcaaatgacaacgcctacttcggctacagcaccccctgggggtattttgacttcagcagattccactgccacttctcaccacgtgactggcagcgactcatcaacaacaactggggattccggcctaagcgactcaacttcaagctcttcaacattcaggtcaaagaggttacggacaacaatggagtcaagaccatcgccaataaccttaccagcacggtccaggtcttcacggactcagactatcagctcccgtacgtgcttgggtcggctcacgagggctgcctcccgccgttcccagcggacgttttcatgattcctcagtacgggtatctgacgcttaatgatggaagccaggccgtgggtcgttcgtccttttactgcctggaatattttccgtcgcaaatgcttcgtaccggaaacaactttaccttcagctacgagtttgagaacgtacctttccatagcagctacgctcacagccaaagcctggaccgactaatgaatccactcatcgaccaatacttgtactatctctcaaagactattaacggttctgggcagaatcaacaaacgctaaaattcagtgtggccggacccagcaacatggctgtccagggaagaaactacatacctggacccagctaccgacaacaacgtgtctcaaccactgtgactcaaaacaacaacagcgaatttgcttggcctggagcttcttcttgggctctcaatggacgcaatagcttgatgaatcctggacctgctatggccagccacaaagaaggagaggaccgtttctttcctttgtctggatctttaatttttggcaaacaaggaactggaagagacaacgtggatgcggacaaagtcatgataaccaacgaagaagaaattaaaactactaacccggtagcaacggagtcctatggacaagtggccacaaaccaccagagtgcccaagcacaggcgcagaccggctgggttcaaaaccaaggaatacttccgggtatggtttggcaggacagagatgtgtacctgcaaggacccatttgggccaaaattcctcacacggacggcaactttcacccttctccgctgatgggagggtttggaatgaagcacccgcctcctcagatcctcatcaaaaacacacctgtacctgcggatcctccaacggctttcaacaaggacaagctgaactctttcatcactcagtattctactggccaagtcagcgtagagattgagtgggagctgcagaaggaaaacagcaagcgctggaacccggagatccagtacacttccaactattacaagtctaataatgttgaatttgctgttaatactgaaggtgtttattctgaaccccgccccattggcaccagatacctgactcgtaatctgtaa

SEQ ID NO: 359 - DNA, 2211 bp, Adeno-Associated Virus
  source 1..2211: mol_type = other DNA; note = BMN_0320
atggctgccgatggttatcttccagattggctcgaggacaacctctctgagggcattcgcgagtggtgggcgctgaaacctggagccccgcagcccaaggcgaaccagcaaaagcaggacgacggccggggtctggtgcttcctggctacaagtacctcggacccttcaacggactcgacaagggggagcccgtcaacgaggcggacgccgcggccctcgagcacgacaaggcctacgaccagcagctcaaagcgggtgacaatccgtacctgcggtataaccacgccgacgccgagtttcaggagcgtcttcaagaagatacgtctttcgggggcaacctcgggcgagcagtcttccaggccaagaagcgggttctcgaacctctgggcctggtcgaggaggcagctaagacggctcctggaaagaagaggcctgtagagcagtctcctcaggaaccggactcctccgcgggtattggcaaatcgggtgcacagcccgctaaaaagagactcaatttcggtcagactggcgacacagagtcagtccccgaccctcaaccaatcggagaacctcccgcagccccctcaggtgtgggatctcttacaatggcttcaggtggtggcgcaccagtggcagacaataacgaaggtgccgatggagtgggtagttcctcgggaaattggcattgcgattcccaatggctgggggacagagtcatcaccaccagcacccgaacctgggccctgcccacctacaacaatcacctctacaagcaaatctccaacagcacatctggaggatcttcaaatgacaacgcctacttcggctacagcaccccctgggggtattttgacttcaacagattccactgccacttctcaccacgtgactggcagcgactcatcaacaacaactggggattccggcctaagcgactcaacttcaagctcttcaacattcaggtcaaagaggttacggacaacaatggagtcaagaccatcgccaataaccttaccagcacggtccaggtcttcacggactcagactatcagctcccgtacgtgcttgggtcggctcacgagggctgcctcccgccgttcccagcggacgttttcatgattcctcagtacgggtatctgacgcttaatgatggaagccaggccgtgggtcgttcgtccttttactgcctggaatattttccgtcgcaaatgcttcgtaccggaaacaactttaccttcagctacgagtttgagaacgtacctttccatagcagctacgctcacagccaaagcctggaccgactaatgaatccactcatcgaccaatacttgtactatctctcaaagactattaacggttctgggcagaatcaacaaacgctaaaattcagtgtggccggacccagcaacatggctgtccagggaagaaactacatacctggacccagctaccgacaacaacgtgtctcaaccactgtgactcaaaacaacaacagcgaatttgcttggcctggagcttcttcttgggctctcaatggacgcaatagcttgatgaatcctggacctgctatggccagccacaaagaaggagaggaccgtttctttcctttgtctggatctttaatttttggcaaacaaggaactggaagagacaacgtggatgcggacaaagtcatgataaccaacgaagaagaaattaaaactactaacccggtagcaacggagtcctatggacaagtggccacaaaccaccagagtgcccaagcacaggcgcagaccggctgggttcaaaaccaaggaatacttccgggtatggtttggcaggacagagatgtgtacctgcaaggacccatttgggccaaaattcctcacacggacggcaactttcacccttctccgctgatgggagggtttggaatgaagcacccgcctcctcagatcctcatcaaaaacacacctgtacctgcggatcctccaacggctttcaacaaggacaagctgaactctttcatcactcagtattctactggccaagtcagcgtagagattgagtgggagctgcagaaggaaaacagcaagcgctggaacccggagatccagtacacttccaactattacaagtctaataatgttgaatttgctgttaatactgaaggtgtttattctgaaccccgccccattggcaccagatacctgactcgtaatctgtaa

SEQ ID NO: 360 - DNA, 2211 bp, Adeno-Associated Virus
  source 1..2211: mol_type = other DNA; note = BMN_0321
atggctgccgatggttatcttccagattggctcgaggacaacctctctgagggcattcgcgagtggtgggcgctgaaacctggagccccgcagcccaaggcgaaccagcaaaagcaggacgacggccggggtctggtgcttcctggctacaagtacctcggacccttcaacggactcgacaagggggagcccgtcaacgaggcggacgccgcggccctcgagcacgacaaggcctacgaccagcagctcaaagcgggtgacaatccgtacctgcggtataaccacgccgacgccgagtttcaggagcgtcttcaagaagatacgtctttcgggggcaacctcgggcgagcagtcttccaggccaagaagcgggttctcgaacctctgggcctggtcgaggaggcagctaagacggctcctggaaagaagaggcctgtagagcagtctcctcaggaaccggactcctccgcgggtattggcaaatcgggtgcacagcccgctaaaaagagactcaatttcggtcagactggcgacacagagtcagtccccgaccctcaaccaatcggagaacctcccgcagccccctcaggtgtgggatctcttacaatggcttcaggtggtggcgcaccagtggcagacaataacgaaggtgccgatggagtgggtagttcctcgggaaattggcattgcgattcccgatggctgggggacagagtcatcaccaccagcacccgaacctgggccctgcccacctacaacaatcacctctacaagcaaatctccaacagcacatctggaggatcttcaaatgacaacgcctacttcggctacagcaccccctgggggtattttgacttcaacagattccactgccacttctcaccacgtgactggcagcgactcatcaacaacaactggggattccggcctaagcgactcaacttcaagctcttcaacattcaggtcaaagaggttacggacaacaatggagccaagaccatcgccaataaccttaccagcacggtccaggtcttcacggactcagactatcagctcccgtacgtgcttgggtcggctcacgagggctgcctcccgccgttcccagcggacgttttcatgattcctcagtacgggtatctgacgcttaatgatggaagccaggccgtgggtcgttcgtccttttactgcctggaatattttccgtcgcaaatgcttcgtaccggaaacaactttaccttcagctacgagtttgagaacgtacctttccatagcagctacgctcacagccaaagcctggaccgactaatgaatccactcatcgaccaatacttgtactatctctcaaagactattaacggttctgggcagaatcaacaaacgctaaaattcagtgtggccggacccagcaacatggctgtccagggaagaaactacatacctggacccagctaccgacaacaacgtgtctcaaccactgtgactcaaaacaacaacagcgaatttgcttggcctggagcttcttcttgggctctcaatggacgcaatagcttgatgaatcctggacctgctatggccagccacaaagaaggagaggaccgtttctttcctttgtctggatctttaatttttggcaaacaaggaactggaagagacaacgtggatgcggacaaagtcatgataaccaacgaagaagaaattaaaactactaacccggtagcaacggagtcctatggacaagtggccacaaaccaccagagtgcccaagcacaggcgcagaccggctgggttcaaaaccaaggaatacttccgggtatggtttggcaggacagagatgtgtacctgcaaggacccatttgggccaaaattcctcacacggacggcaactttcacccttctccgctgatgggagggtttggaatgaagcacccgccccctcagatcctcatcaaaaacacacctgtacctgcggatcctccaacggctttcaacaaggacaagctgaactctttcatcactcagtattctactggccaagtcagcgtagagattgagtgggagctgcagaaggaaaacagcaagcgctggaacccggagatccagtacacttccaactattacaagtctaataatgttgaatttgctgttaatactgaaggtgtttattctgaaccccgccccattggcaccagatacctgactcgtaatctgtaa

SEQ ID NO: 361 - protein, 728 aa, Adeno-Associated Virus
  source 1..728: note = BCD_0505
MSFVDHPPDWLEEVGEGLHEFLELEAGPPKPKPNQQKQDNARGLVLPGYNYLGPFNGLDKGEPVNRADAVAREHDISYNEQLQAGDNPYLKYNHADAEFQEKLKDDTSFGGNLGKAIFQAKKRVLEPFGLVEAPVKTAPAKKRPIEKSPAEPSSSKGIGKAGQQPARKRLNFGQTGDTDSAADPQPLGEPPAAPSGLGTGTMASGGGAPMADNNEGADGVGNASGNWHCDSTWLGDRVITTSTRTWALPTYNNHLYKQISSSSGSGATNDNHYFGYSTPWGYFDFNRFHCHFSPRDWQRLINNNWGFRPKRLNFKLFNIQVKEVTETDGTKTIANNLTSTVQVFADSEYQLPYVLGSAHQGCFPPFPADVFMVPQYGYLTLNNGSQAMGRSSFYCLEYFPSQMLRTGNNFTFSYTFEDVPFHSSYAHSQSLDRLMNPLIDQYLYYLSKTQNGLAFSQAGPSSMRNQSRNWLPGPCFRQQRISKTSTENNNGEFSWTGATKYHLNGRDSVMNPGPAMASHKDDEHRFFPQNGVLIFGKQGADKTNAILDKVIVTDEEEIRATNPVATEEYGFVATTLQNGQTAADTTRVNAQGILPGMVWQDRDVYLQGPIWAKIPYTDGHFHPSPLMGGFGLKHPPPQILIKNTPVPSNPPDTFNPEKLNSFITQYSTGQVSVEIEWELQKENSKRWNPEVQYTSNYDKSVNVDFTVNGDGVYSEPRTIGTRYLTRNL

SEQ ID NO: 362 - protein, 727 aa, Adeno-Associated Virus
  source 1..727: note = BCD_0506
MSFVDHPPDWLEEVGEGLHEFLELEAGPPKPKPNQQKQDNARGLVLPGYNYLGPFNGLDKGEPVNRADAVAREHDISYNEQLQAGDNPYLKYNHADAEFQEKLKDDTSFGGNLGKAIFQAKKRVLEPFGLVEAPVKTAPAKKRPIEKSPAEPSSSKGIGKAGQQPARKRLNFGQTGDTDSAPDPQPLGEPPAAPSGLGTGTMASGSGAPMADNNEGADGVGNASGNWHCDSTWLGDRVITTSTRTWALPTYNNHLYKQISSSQAGASNDNHYFGYSTPWGYFDFNRFHCHFSPRDWQRLINNNWGFRPKRLNFKLFNIQVKEVTDTEGTKTIANNLTSTVQVFADSEYQLPYVLGSAHQGCFPPFPADVFMIPQYGYLTLNNGSQAMGRSSFYCLEYFPSQMLRTGNNFTFSYTFEDVPFHSSYAHSQSLDRLMNPLIDQYLYYLSKTNGGLGFSQAGPNSMRDQSRNWLPGPCFRQQRISTVPTQNNNGDFSWAGATKYHLNGRNSAMNPGPAMASHKDDEHRFFPQNGVLIFGKQGAEKNNAILDKVIITDEEEIRTTNPVATEEYGFVATSLQSPTEAAETARVNAQGILPGMVWQDRDVYLQGPIWAKIPHTDGHFHPSPLMGGFGLKRPPPQILIKNTPVPSDPPLTFNPAKLASFITQYSTGQVSVEIEWELQKENSKRWNPEVQYTSNYNKSVNVDFTVDNNGVYSEPRTIGTRYLTRNL

SEQ ID NO: 363 - DNA, 2187 bp, Adeno-Associated Virus
  source 1..2187: mol_type = other DNA; note = BCD_0505
atgtcgtttgttgatcaccctccagattggttggaagaggttggtgaaggccttcacgagtttttggagctcgaagctggcccacccaaaccgaagcccaaccagcagaagcaggacaacgcccgtggtcttgtactgcctggatataattatctgggacccttcaacggactcgacaagggagagcccgtcaaccgagcggacgctgttgctcgagagcacgacatctcgtacaacgagcagctccaggcgggagacaacccctacctcaagtacaaccacgcggacgccgagtttcaggagaagctcaaggacgacacctcctttgggggcaacctcggaaaggcaatctttcaggccaagaaaagggttctcgaaccttttggcctggttgaggcacctgttaagacggctccagccaagaagcggccgatagagaagtctccggcggaaccgagctcttcgaagggcatcggcaaggcgggccagcagcctgcgagaaagcgactcaactttggtcagactggagacaccgactccgccgctgacccccagcctctcggagaaccacccgcagccccctctggtctgggaactggtacgatggcttcaggcggtggcgcaccaatggcagacaataacgaaggcgccgacggagtgggtaatgcctcgggaaattggcattgcgattccacatggctgggcgaccgagtcatcaccaccagcacccgcacctgggccttgcctacctacaacaaccacctctacaaacaaatctccagcagttccggatcgggtgctaccaacgacaaccactactttggctacagcaccccctgggggtactttgacttcaaccgcttccactgccacttctcgccgcgagactggcagcgactcatcaacaacaactgggggttccggcccaagcgactcaacttcaagctgttcaacatccaagtcaaggaagttactgaaacggacggcacgaagaccatcgccaataaccttaccagcacggttcaggtctttgcggactcggagtaccagctcccgtacgtcctcggatcagcgcaccagggctgcttcccgccgttcccggcggacgtcttcatggtcccgcaatacgggtacctgacgctgaataacggcagccaggcgatgggtcgctcgtctttctactgcctggagtactttccgtcgcagatgctgcggacggggaacaacttcacgttcagctacaccttcgaggacgtgcccttccacagcagctacgcgcacagtcagagcctggaccggctgatgaacccgctcatcgaccaatatctgtactacctgagcaagactcagaacggattggcgttctctcaagcggggccctcgagcatgcggaaccagtccaggaactggcttccggggccttgcttccgacagcagcggatttcaaagacgtcaacggagaacaataacggagaattctcgtggacgggagccacaaaatatcatctcaacggcagagactctgtgatgaacccaggtccagccatggccagccacaaggacgacgaacacaggttcttccctcagaatggcgtgctcatttttggaaaacagggcgcagacaagaccaatgcgatactcgacaaagtgatagttacagacgaagaggagattagggctacgaaccctgtggccacagaggaatatggattcgtcgccaccacccttcagaatgggcaaactgcagcagacacaaccagggttaatgcacaaggaatccttcccggcatggtgtggcaagatagagacgtgtaccttcagggacccatctgggccaagatcccctacacggacggacattttcatccctcgccgctcatgggcgggttcggactcaagcacccgcccccgcagattctcatcaagaacacacctgtaccttcgaatcctccagatacattcaacccggaaaagctcaattcttttataactcaatattcaacgggccaggtcagtgtggagatagagtgggagctgcagaaggaaaacagcaagcgctggaaccccgaggtccagtacacgtccaactacgacaagtccgtcaacgtggacttcacagtgaacggggatggcgtgtactcggaaccgcgaaccatcggaacccgctaccttacccgcaacctgtaa

SEQ ID NO: 364 - DNA, 2184 bp, Adeno-Associated Virus
  source 1..2184: mol_type = other DNA; note = BCD_0506
atgtcgtttgttgatcaccctccagattggttggaagaggttggtgaaggccttcacgagtttttggagctcgaagctggcccacccaaaccgaagcccaaccagcagaagcaggacaacgcccgtggtcttgtactgcctggatataattatctgggacccttcaacggactcgacaagggagagcccgtcaaccgagcggacgctgttgcgcgagagcacgacatctcgtacaacgagcagctccaggcgggagacaacccctacctcaagtacaaccacgcggacgccgagtttcaggagaagctcaaggacgacacctcctttgggggcaacctcggaaaggcaatttttcaggccaagaaaagggttctcgaaccttttggcctggttgaggcacctgttaagacggctccagccaagaagcggccgatagagaagtctccggcggaaccgagctcttcgaagggcatcggcaaggcgggccagcagcctgcgagaaagcgactcaactttggtcagactggagacaccgactccgcccctgacccccagcctctcggagaaccacccgcagccccctctggtctgggaactggtacgatggcttcaggcagtggcgcaccaatggcagacaataacgaaggcgccgacggagtgggtaatgcctcgggaaattggcattgcgattccacatggctgggcgaccgagtcatcaccaccagcacccgcacctgggccctgcccacctacaacaaccatctctacaagcaaatctccagtagtcaggccggagccagcaacgataaccactactttggctacagcaccccctgggggtactttgacttcaaccgcttccactgccacttttccccgcgagactggcagcggctcatcaacaacaactgggggttccgtcccaagcggctcaacttcaagctgttcaacatccaagtcaaggaggttacggacacggaaggcacgaaaactatcgccaataaccttaccagcacggttcaggtctttgcggactcggagtaccagctcccgtacgtcctcggctcggcgcaccagggctgcttcccgccgttcccggcggacgtcttcatgatcccgcagtacgggtacctgaccctaaacaacggcagtcaggcgatgggtcgctcgtccttctactgtctggagtactttccgtcgcagatgctgcggacgggaaacaactttacattcagctacaccttcgaggacgtgcccttccacagcagctacgcgcacagccagagtctggaccgtctcatgaacccactcatcgaccagtacctgtactacctaagcaagacaaatggcggtctaggattttcccaagcgggacccaacagcatgcgcgaccagtccaggaattggctgccgggaccctgcttcagacaacaacggatttcaactgtacctacacaaaataacaacggagacttttcgtgggcgggagccacaaagtatcatctcaatggtagaaactcggcgatgaacccgggcccggccatggctagccataaggacgacgagcacaggttcttccctcagaacggcgtgctcatctttggaaaacagggcgcagaaaaaaacaatgcgatactcgacaaggtaatcatcactgacgaggaggagatcaggaccacaaaccctgtagccacggaggagtacgggtttgtcgccactagtctacaaagcccgaccgaagcagccgagaccgcaagagtcaacgcgcaaggcatcctccctggcatggtgtggcaggaccgagacgtgtatctgcagggacccatctgggctaagattccccacacggacggacacttccacccatcgccgctcatgggcgggttcggccttaagcgaccacctccacagatcctcatcaagaatacgccggtgccatcggaccctccattgaccttcaacccggcgaagctagcgtcctttatcacgcagtactccacgggccaggtcagcgtggaaatcgagtgggagctgcagaaggagaacagcaagcgctggaaccccgaggtccagtacacctccaactacaacaagtccgtcaacgtagacttcaccgtggacaacaacggcgtgtactcggaaccgcgaaccatcggcacccgctaccttacccgcaacctgtaa

We claim:

1. A member of an adeno-associated virus (AAV) clade, comprising:
(a) a VP1 amino acid sequence that has at least 90% identity to the VP1 amino acid sequence of any one of SEQ ID NOs: 12-127 and 361-362, (b) a VP2 amino acid sequence that has at least 90% identity to the VP2 amino acid sequence of any one of SEQ ID NOs: 12-127 and 361-362, or (c) a VP3 amino acid sequence that has at least 90% identity to the VP3 amino acid sequence of any one of SEQ ID NOs: 12-127 and 361-362.

2. The AAV clade member of claim 1, wherein (a) the VP1 amino acid sequence has at least 95% identity to the VP1 amino acid sequence of any one of SEQ ID NOs: 12-127 and 361-362, (b) the VP2 amino acid sequence has at least 95% identity to the VP2 amino acid sequence of any one of SEQ ID NOs: 12-127 and 361-362, or (c) the VP3 amino acid sequence has at least 95% identity to the VP3 amino acid sequence of any one of SEQ ID NOs: 12-127 and 361-362.

3. The AAV clade member of claim 1, wherein the VP1 amino acid sequence has at least 98% identity to the VP1 amino acid sequence of any one of SEQ ID NOs: 12-127 and 361-362.

4. The AAV clade member of claim 1, 2, or 3, wherein the VP1, VP2, or VP3 amino acid sequence comprises a variable region sequence, wherein the variable region sequence is selected from the variable region of at least one of SEQ ID NOs: 12-127 and 361-362.

5. The AAV clade member any one of claims 1 to 4, wherein the VP1 amino acid sequence further comprises a GBS region sequence, wherein the GBS region sequence is selected from the GBS region sequence of at least one of: SEQ ID NOs: 12-127 and 361-362.

6. The AAV clade member any one of claims 1 to 5, wherein the VP1 amino acid sequence further comprises a GH loop sequence, wherein the GH loop sequence is selected from the GH loop of at least one of: SEQ ID NOs: 12-127 and 361-362.

7. The AAV clade member any one of claims 1 to 6, wherein the VP2 amino acid sequence is the VP2 amino acid sequence of any one of SEQ ID NOs: 12-127 and 361-362.

8. The AAV clade member any one of claims 1 to 6, wherein the VP3 amino acid sequence is the VP3 amino acid sequence of any one of SEQ ID NOs: 12-127 and 361-362.

9. The AAV clade member any one of claims 1 to 6, wherein the VP1 amino acid sequence is the VP1 amino acid sequence of any one of SEQ ID NOs: 12-127 and 361-362.

10. The AAV clade member of any one of claims 1 to 8, wherein the VP1, VP2, or VP3 amino acid sequence comprises one or more of the amino acid modifications listed in Table 2.

11. The AAV clade member of claim 10, wherein the one or more of the amino acid modifications of the VP1, VP2, or VP3 amino acid sequence are limited to the ones listed in Table 2.

12. A member of an adeno-associated virus (AAV) clade, comprising:
a VP1 amino acid sequence that has a least 90% sequence identity to a representative VP1 amino acid sequence of a AAV clade, and wherein the representative sequence is selected from any one of: SEQ ID NOs: 28, 10, 91, 7, 9, 4, 27, 3, 1, and 23.

13. The AAV clade member of claim 12, wherein the VP1 amino acid sequence has at least 95% identity to any one of: SEQ ID NOs: SEQ ID NOs: 28, 10, 91, 7, 9, 4, 27, 3, 1, and 23.

14. The AAV clade member of claim 12, wherein the VP1 amino acid sequence has at least 98% identity to any one of: SEQ ID NOs: SEQ ID NOs: 28, 10, 91, 7, 9, 4, 27, 3, 1, and 23.

15. The AAV clade member of claim 12, wherein the VP1 amino acid sequence has at least 99% identity to any one of: SEQ ID NOs: SEQ ID NOs: 28, 10, 91, 7, 9, 4, 27, 3, 1, and 23.

16. The AAV clade member of any one of claims 12 to 15, wherein the VP1 amino acid sequence comprises one or more of the amino acid modifications listed in Table 2.

17. The AAV clade member of claim 16, wherein the VP1 amino acid sequence modifications are limited to the ones listed in Table 2.

18. A member of an adeno-associated virus (AAV) clade, comprising:
a VP1 amino acid sequence that has a variable region amino acid sequence, wherein the variable region amino acid sequence has substantial sequence identity to a variable region amino acid sequence in any one of: SEQ ID NOs: 12-127 and 361-362.

19. The AAV clade member of claim 18, wherein the variable region amino acid sequence is selected from any one of VRI-VRIX, a GBS region, or a GH loop, or a combination thereof.

20. The AAV clade member of claim 19, wherein the any one of VRI-VRIX sequence has at least 90% sequence identity to any one of VRI-VRIX of any one of SEQ ID NOs: 12-127 and 361-362.

21. The AAV clade member of claim 19, wherein the GBS region sequence has at least 90% sequence similarity or identity to the GBS region of any one of SEQ ID NOs: 12-127 and 361-362.

22. The AAV clade member of claim 19, wherein the GH loop sequence has at least 90% sequence similarity or identity to the GH loop of any one of SEQ ID NOs: 12-127 and 361-362.

23. A member of an adeno-associated virus (AAV) clade, comprising:
a first VP1 amino acid sequence that is phylogenetically related to a second VP1 amino acid sequence as determined by Neighbor-joining method, wherein the first VP1 amino acid sequence has a genetic distance to the second VP1 amino acid sequence as provided in Table 3.

24. The AAV clade member of claim 23, wherein the genetic distance is the mean genetic distance within the same AAV clade, as provided in Table 3.

25. The AAV clade member of claim 23, wherein the genetic distance is a range from about the min genetic distance within the same clade to about the max genetic distance within the same clade, as provided in Table 3.

26. The AAV clade member of any one of claims 23 to 25, wherein the second VP1 amino acid sequence comprises a VP1 amino acid sequence of any one of: SEQ ID NOs: 1-180 and 361-362.

27. A member of an adeno-associated virus (AAV) branch, comprising:
a first VP1 amino acid sequence that is phylogenetically related to a second VP1 amino acid sequence as determined by Neighbor-joining method, wherein the first VP1 amino acid sequence has a genetic distance to the second VP1 amino acid sequence as provided in Table 3.

28. The AAV branch member of claim 27, wherein the genetic distance is the mean genetic distance within the same branch as provided in Table 3.

29. The AAV branch member of claim 27, wherein the genetic distance is a range from about the min genetic distance within the same branch to about the max genetic distance within the same branch as provided in Table 3.

30. The AAV branch member of claim 27, wherein the second VP1 amino acid sequence comprises a VP1 amino acid sequence of any one of SEQ ID NOs: 1-180 and 361-362.

31. The AAV clade or AAV branch member of any of the preceding claims, further comprising the ability to evade AAV humoral immunity as determined by an in vitro assay.

32. The AAV clade or AAV branch member of claim 31, wherein the in vitro assay is an IVIg assay that determines a percent (%) transduction, and wherein the % transduction is about 2% to about 500% greater transduction as compared to a reference AAV at a given IVIg concentration.

33. The AAV clade or AAV branch member of claim 31, wherein the in vitro assay is an IVIg assay that determines a neutralizing antibody (Nab) titer, and wherein the NAb titer is reduced to about 1-fold to about 4,000-fold as compared to a reference AAV.

34. The AAV clade or AAV branch member of claim 31, wherein the in vitro assay is an IVIg assay that determines a NC₅₀, and wherein the NC₅₀ increases from about 1-fold to about 600-fold as compared to a reference AAV.

35. An AAV capsid protein, comprising:
(a) a VP1 amino acid sequence that has at least 90% identity to the VP1 amino acid sequence of any one of SEQ ID NOs: 12-127 and 361-362, (b) a VP2 amino acid sequence that has at least 90% identity to the VP2 amino acid sequence of the VP2 sequence of any one of SEQ ID NOs: 12-127 and 361-362, or (c) a VP3 amino acid sequence that has at least 90% identity to the VP3 amino acid sequence of any one of SEQ ID NOs: 12-127 and 361-362.

36. The AAV capsid protein of claim 35, wherein (a) the VP1 amino acid sequence has at least 95% identity to the VP1 amino acid sequence of any one of SEQ ID NOs: 12-127 and 361-362, (b) the VP2 amino acid sequence has at least 95% identity to the VP2 amino acid sequence of ay one of SEQ ID NOs: 12-127 and 361-362, or (c) the VP3 amino acid sequence has at least 95% identity to the VP3 amino acid sequence of any one of SEQ ID NOs: 12-127 and 361-362.

37. The AAV capsid protein of claim 35, wherein (a) the VP1 amino acid sequence has at least 98% identity to the VP1 amino acid sequence of any one of SEQ ID NOs: 12-127 and 361-362, (b) the VP2 amino acid sequence has at least 98% identity to the VP2 amino acid sequence of any one of SEQ ID NOs: 12-127 and 361-362, or (c) the VP3 amino acid sequence has at least 98% identity to the VP3 amino acid sequence of any one of SEQ ID NOs: 12-127 and 361-362.

38. The AAV capsid protein of claim 35, wherein the VP1, VP2, or VP3 amino acid sequence is a VP1, VP2 or VP3 amino acid sequence of any one of SEQ ID NOs: 12-127 and 361-362.

39. The AAV capsid protein of any one of claims 35 to 38, wherein the VP1, VP2, or VP3 amino acid sequence comprises a variable region amino acid sequence, and wherein the variable region amino acid sequence is a VRI-VRIX of any one of: SEQ ID NOs: 12-127 and 361-362.

40. The AAV capsid protein of any one of claims 35 to 39, wherein the VP1, VP2, or VP3 amino acid sequence comprises a GBS region amino acid sequence, and wherein the GBS region amino acid sequence is a GBS region of any one of: SEQ ID NOs: 12-127 and 361-362.

41. The AAV capsid protein of any one of claims 35 to 40, wherein the VP1, VP2, or VP3 amino acid sequence comprises a GH loop amino acid sequence, and wherein the GH loop amino acid sequence is a GH loop selected from any one of: SEQ ID NOs: 12-127 and 361-362.

42. The AAV capsid protein of any one of claims 35 to 41, further comprising the ability to evade AAV humoral immunity as determined by an in vitro assay.

43. The AAV capsid protein of any one of claims 35 to 42, wherein the in vitro assay is an IVIg assay that determines a percent (%) transduction, and wherein the % transduction is about 2% to about 500% greater transduction as compared to a reference AAV at a given IVIg concentration.

44. The AAV capsid protein of any one of claims 35 to 42, wherein the in vitro assay is an IVIg assay that determines a NC₅₀, and wherein the NAb titer is reduced to about 1-fold to about 4,000-fold as compared to a reference AAV.

45. The AAV capsid protein of any one of claims 35 to 42, wherein the in vitro assay is an IVIg assay that determines a NC₅₀, and wherein the NC₅₀ increases from about 1-fold to about 600-fold as compared to a reference AAV.

46. A vector, comprising:
(a) a nucleotide sequence encoding a VP1, VP2, or VP3 capsid protein that has at least 90% identity to the VP1, VP2, or VP3 of any one of SEQ ID NOs: 12-127 and 361-362; and
(b) a heterologous regulatory sequence that controls expression of the capsid protein in a host cell.

47. The vector of claim 46, wherein the nucleotide sequence encoding a VP1, VP2, or VP3 capsid protein has at least 95% identity to the VP1, VP2, or VP3 of any one of SEQ ID NOs: 12-127 and 361-362.

48. The vector of claim 46, wherein the nucleotide sequence encoding a VP1, VP2, or VP3 capsid protein has at least 98% identity to the VP1, VP2, or VP3 of any one of SEQ ID NOs: 12-127 and 361-362.

49. A vector, comprising:
(a) a nucleotide sequence encoding a VP1 amino acid sequence of the AAV clade member of any one of claim 1-26 or 31-34; and
(b) a heterologous regulatory sequence that controls expression of the capsid protein in a host cell.

50. A vector, comprising:
(a) a nucleotide sequence encoding a VP1 amino acid sequence of the AAV branch member of any one of claims 27-34; and
(b) a heterologous regulatory sequence that controls expression of the capsid protein in a host cell.

51. The vector of any one of claims 46 to 50, wherein the vector further comprises a transgene comprising a nucleotide sequence encoding a biomolecule operably linked to a heterologous regulatory sequence that controls expression of the capsid protein in a host cell.

52. An in vitro host cell, comprising the nucleotide sequence encoding a VP1, VP2, or VP3 capsid protein of any one of claims 35 to 45.

53. A novel recombinant AAV viral particle, comprising:
(a) a capsid, wherein the capsid comprises a VP1 amino acid sequence of a AAV clade member of any one of claims 1 to 26 or 31 to 34; and
(b) an rAAV vector genome comprising a nucleotide sequence encoding a biomolecule operably linked to a heterologous regulatory sequence that controls expression of the nucleotide sequence in a host cell.

54. A novel recombinant AAV viral particle, comprising:
(a) a capsid, wherein the capsid comprises a VP1 amino acid sequence of a AAV branch member of any one of claims 27 to 34; and
(b) an rAAV vector genome comprising a nucleotide sequence encoding a biomolecule operably linked to a heterologous regulatory sequence that controls expression of the nucleotide sequence in a host cell.

55. A novel recombinant AAV viral particle, comprising:
(a) the AAV capsid protein of any one of claims 35 to 45; and
(b) an rAAV vector genome comprising a nucleotide sequence encoding a biomolecule operably linked to a heterologous regulatory sequence that controls expression of the nucleotide sequence in a host cell.

56. The novel recombinant AAV viral particle of any one of claims 53 to 55, wherein the rAAV vector genome comprises an AAV inverted terminal repeat or a fragment thereof.

57. The novel recombinant AAV viral particle of any one of claims 53 to 55, wherein the rAAV vector genome comprises a 5′ AAV inverted terminal repeat and a 3′ AAV inverted terminal repeat.

58. The novel recombinant AAV viral particle of claim 56, wherein the AAV inverted terminal repeat is a 5′ AAV inverted terminal repeat selected from Table 4.

59. The novel recombinant AAV viral particle of claim 56, wherein the AAV inverted terminal repeat is a 3′ AAV inverted terminal repeat selected from Table 4.

60. The novel recombinant AAV viral particle of claim 57, wherein the 5′ AAV inverted terminal repeat and 3′ AAV inverted terminal repeat are selected from Table 4.

61. The novel recombinant AAV viral particle of any one of claims 53 to 58, wherein the biomolecule is selected from a therapeutic protein, an enzyme, a peptide, an RNA, a component of CRISPR gene editing system, an antisense oligonucleotides (AONs), an AON-mediated exon skipping, a poison exon, or a dominant negative mutant protein.

62. The novel recombinant AAV viral particle of claim 61, wherein the therapeutic protein is endogenously expressed in one or more of a muscle, heart, brain, plasma, kidney, liver or cancer cell of a subject.

63. The novel recombinant AAV viral particle of claim 62, wherein therapeutic protein is a functional version of the endogenously expressed protein.

64. The novel recombinant AAV viral particle of any one of claims 53 to 63, wherein the recombinant AAV viral particle has enhanced tropism to a muscle cell as compared to a reference AAV.

65. The novel recombinant AAV viral particle of any one of claims 53 to 63, wherein the recombinant AAV viral particle has enhanced tropism to a heart cell as compared to a reference AAV.

66. The novel recombinant AAV viral particle of any one of claims 53 to 63, wherein the recombinant AAV viral particle has enhanced tropism to a brain cell as compared to a reference AAV.

67. The novel recombinant AAV viral particle of any one of claims 53 to 63, wherein the recombinant AAV viral particle has enhanced tropism to a plasma cell as compared to a reference AAV.

68. The novel recombinant AAV viral particle of any one of claims 53 to 63, wherein the recombinant AAV viral particle has enhanced tropism to a kidney cell as compared to a reference AAV.

69. The novel recombinant AAV viral particle of any one of claims 53 to 63, wherein the recombinant AAV viral particle has enhanced tropism to a liver cell as compared to a reference AAV.

70. The novel recombinant AAV viral particle of any one of claims 53 to 69, wherein the novel recombinant AAV viral particle de-targets cells in a subject other than the cell for which the novel rAAV has enhanced tropism.

71. The novel recombinant AAV viral particle of claim 70, wherein the de-targeted cell is selected from one or more of a muscle, heart, brain, plasma, kidney, or liver cell.

72. The novel recombinant AAV viral particle of any one of claims 53 to 71, wherein the recombinant AAV viral particle has the ability to evade AAV humoral immunity as determined by an in vitro assay.

73. The novel recombinant AAV viral particle of claim 72, wherein the in vitro assay is an IVIg assay that determines a percent (%) transduction, and wherein the % transduction is about 2% to about 500% greater transduction as compared to a reference AAV at a given IVIg concentration.

74. The novel recombinant AAV viral particle of claim 72, wherein the in vitro assay is an IVIg assay that determines a NC₅₀, and wherein the NAb titer is reduced to about 1-fold to about 4,000-fold as compared to a reference AAV.

75. The novel recombinant AAV viral particle of claim 72, wherein the in vitro assay is an IVIg assay that determines a NC₅₀, and wherein the NC₅₀ increases from about 1-fold to about 600-fold as compared to a reference AAV.

76. An in vitro cell or tissue comprising: the novel recombinant AAV viral particle of any one of claims 53 to 75.

77. An ex vivo cell or tissue comprising: the novel recombinant AAV viral particle of any one of claims 53 to 75.

78. A cultured host cell, comprising:
a recombinant nucleic acid molecule comprising a nucleotide sequence encoding an AAV VP1 capsid protein comprising: (a) a sequence comprising the full length VP1 capsid protein of any one of SEQ ID NOs: 12-127 and 361-362; or (b) an amino acid sequence with at least 95% identity to the full length VP1 protein of any one of SEQ ID NOs: 12-127 and 361-362, wherein the recombinant nucleic acid molecule further comprises a heterologous sequence.

79. A cultured host cell, comprising:
a recombinant nucleic acid molecule comprising a nucleotide sequence encoding an AAV VP2 capsid protein comprising: (a) a sequence comprising the full length VP2 capsid protein of any one of SEQ ID NOs: 12-127 and 361-362; or (b) an amino acid sequence with at least 95% identity to the full length VP2 protein of any one of SEQ ID NOs: 12-127 and 361-362, wherein the recombinant nucleic acid molecule further comprises a heterologous sequence.

80. A cultured host cell, comprising:
a recombinant nucleic acid molecule comprising a nucleotide sequence encoding an AAV VP3 capsid protein comprising: (a) a sequence comprising the full length VP3 capsid protein of any one of SEQ ID Nos: 12-127 and 361-362; or (b) an amino acid sequence with at least 95% identity to the full length VP3 protein of any one of SEQ ID NOs: 12-127 and 361-362, wherein the recombinant nucleic acid molecule further comprises a heterologous sequence.

81. The cultured host cell of any one of claims 78 to 80, wherein the amino acid residues varied in the AAV VP1, VP2, or VP3 capsid protein with at least 95% identity to the full length VP1, VP2, or VP3 capsid protein of any one of SEQ ID NOs: 12-127 and 361-362 are selected from Table 2.

82. A cultured host cell containing a recombinant nucleic acid molecule, comprising:
(a) nucleotides of a full length AAV VP1 capsid protein of any one of SEQ ID Nos: 192-307 and 363-364; or (b) a nucleotide sequence at least 95% identical to the nucleotide sequence of the full length VP1 capsid protein of any one of SEQ ID NOs: 192-307 and 363-364, wherein the recombinant nucleic acid molecule further comprises a heterologous nucleotide sequence.

83. A cultured host cell containing a recombinant nucleic acid molecule, comprising:
(a) nucleotides of a full length AAV VP2 capsid protein of any one of SEQ ID NOs: 192-307 and 363-364; or (b) a nucleotide sequence at least 95% identical to the nucleotide sequence of the full length VP2 capsid protein of any one of SEQ ID NOs: 192-307 and 363-364, wherein the recombinant nucleic acid molecule further comprises a heterologous nucleotide sequence.

84. A cultured host cell containing a recombinant nucleic acid molecule, comprising:
(a) nucleotides of a full length AAV VP3 capsid protein of any one of SEQ ID NOs: 192-307 and 363-364; or (b) a nucleotide sequence at least 95% identical to the nucleotide sequence of the full length VP3 capsid protein of any one of SEQ ID NOs: 192-307 and 363-364, wherein the recombinant nucleic acid molecule further comprises a heterologous nucleotide sequence.

85. The cultured host cell of any one of claims 78 to 81, wherein nucleotides varied in the nucleotide sequence encoding the AAV VP1, VP2, or VP3 capsid protein with at least 95% identity to the full length VP1, VP2, or VP3 capsid protein of any one of SEQ ID NOs: 12-127 and 361-362 are selected from nucleotides encoding the amino acid residues that vary in Table 2.

86. A composition, comprising:
(a) the novel recombinant AAV viral particle of any one of claims 53 to 73; and
(b) a physiologically acceptable carrier.

87. A method of delivering a biomolecule to a cell in vitro, comprising:
transducing the cell with the novel recombinant AAV viral particle of any one of claims 53 to 75.

88. A method of delivering a biomolecule to a cell ex vivo, comprising:
transducing the cell with the novel recombinant AAV viral particle of any one of claims 53 to 75.

89. A method of delivering a biomolecule to a cell in a subject, comprising:
administering the novel recombinant AAV viral particle of any one of claims 53 to 73 to the cell in the subject.

90. The method of any one of claims 87 to 89, wherein the cell is one or more of a muscle, heart, brain, plasma, kidney, liver, or cancer cell.

91. A method of treating a disease or disorder, comprising:
administering the novel recombinant AAV viral particle of any one of claims 53 to 75 to a subject.

92. The method of claim 89 or 91, wherein the subject is a human.

93. A method for producing a novel recombinant AAV viral particle, comprising:
culturing a host cell comprising one or more vectors for generating the novel rAAV viral particle, wherein the one or more vectors comprise a nucleotide sequence encoding the capsid protein of any one of claims 35 to 45.

94. A method for producing a novel recombinant AAV viral particle, comprising:
culturing a host cell comprising one or more vectors for generating the novel rAAV viral particle, wherein the one or more vectors comprises a nucleotide sequence encoding a VP1 protein of the AAV clade member of any one of claims 1 to 26 or 31 to 34.

95. A method for producing a novel rAAV viral particle, comprising:
culturing a host cell comprising one or more vectors for generating the novel rAAV viral particle, wherein the one or more vectors comprises a nucleotide sequence encoding a VP1 protein of the AAV branch member of any one of claims 27 to 34.

96. The method of any one of claims 93 to 95, wherein the nucleotide sequence encoding the capsid protein or VP1 protein is operably linked to a heterologous regulatory sequence that controls the expression of the nucleotide sequence in a host cell.

97. The method of any one of claims 93 to 95, wherein the one or more vectors further comprises a nucleotide sequence used by the host cell to generate an rAAV viral particle, and wherein the nucleotide sequence is operably linked to a heterologous regulatory sequence that controls expression of the nucleotide sequence in a host cell.

98. The method of any one of claims 93 to 97, wherein prior to the culturing step the host cell is transfected with the one or more vectors.

99. The method of any one of claims 93 to 98, wherein the novel rAAV viral particle is isolated from the host cell.
